(19) United States
(12) Patent Application Publication
(10) Pub. No.: US 2015/0024442 A1
(43) Pub. Date: Jan. 22, 2015

(54) MODIFIED DIACYLGLYCEROL ACYLTRANSFERASE PROTEINS AND METHODS OF USE THEREOF

(71) Applicant: Matrix Genetics, LLC, Seattle, WA (US)

(72) Inventors: James Roberts, Seattle, WA (US); Kimberly Marie Kotovic, Seattle, WA (US); Jason W. Hickman, San Diego, CA (US); Tracey Jurista, Seattle, WA (US); Michael Carleton, Kirkland, WA (US)

(73) Assignee: Matrix Genetics, LLC, Seattle, WA (US)

(21) Appl. No.: 14/383,853

(22) PCT Filed: Mar. 4, 2013
(86) PCT No.: PCT/US13/28900

§ 371 Date: Sep. 8, 2014

Related U.S. Application Data
(60) Provisional application No. 61/609,063, filed on Mar. 9, 2012.

(51) Int. Cl. C07K 14/195; C12P 7/64; C12N 9/10

(52) U.S. Cl. CPC C07K 14/195; C12N 9/1029; C12P 7/64; C12Y 203/0102
USPC 435/134; 536/23.2; 435/188; 435/320.1; 435/257.2; 435/471

(57) ABSTRACT

Provided are fusion proteins of diacylglycerol acyltransferase (DGAT) polypeptides fused to at least one heterologous intracellular localization domain, such as a bacterial membrane-targeting domain, modified photosynthetic microorganism that comprise such fusion proteins, and related methods for improving the production of lipids by photosynthetic microorganisms, including lipids such as triglycerides, fatty acids, and wax esters.

[0001] This application claims priority to U.S. Provisional Patent Application No. 61/609,063 filed on Mar. 9, 2012 entitled “Modified Diacylglycerol Acyltransferase Proteins and Methods of Use Thereof,” which is hereby incorporated by reference in its entirety.

### SEQUENCE LISTING

[0002] The Sequence Listing associated with this application is provided in text format in lieu of a paper copy, and is hereby incorporated by reference into the specification. The name of the text file containing the Sequence Listing is M077-0009PCT Seq Listing.txt. The text file is about 638 KB, was created on Feb. 15, 2013, and is being submitted electronically via EFS-Web.

### BACKGROUND

[0003] 1. Technical Field

[0004] The present invention relates to fusion proteins of diacylglycerol acyltransferase (DGAT) polypeptides fused to at least one heterologous intracellular localization domain, such as a bacterial membrane-targeting domain, modified photosynthetic microorganism that comprise such fusion proteins, and related methods for improving the production of lipids by photosynthetic microorganisms, including lipids such as triglycerides, fatty acids, and wax esters.

[0005] 2. Description of the Related Art

[0006] Fatty acids are carboxylic acids with an unbranched aliphatic tail or chain, the latter ranging from about four to about 28 carbon atoms in length. Triglycerides are neutral polar molecules consisting of glycerol esterified with three fatty acid molecules. Wax esters are esters of a fatty acid and a long-chain alcohol. Triglycerides and fatty acids can be utilized as carbon and energy storage molecules by most eukaryotic organisms, including plants and algae, and by certain prokaryotic organisms, including certain species of actinomycetes and members of the genus Acinetobacter.

[0007] Triglycerides, fatty acids, and wax esters may also be utilized as a feedstock in the production of biofuels and/or various specialty chemicals. For example, triglycerides and free fatty acids may be subject to a transesterification reaction, in which an alcohol reacts with triglyceride oils or fatty acid molecules, such as those contained in vegetable oils, animal fats, recycled greases, to produce biodiesels such as fatty acid alkyl esters. When triglycerides are included in the starting material, such reactions also produce glycerin as a by-product, which can be purified for use in the pharmaceutical and cosmetic industries.

[0008] Certain organisms can be utilized as a source of triglycerides or free fatty acids in the production of biofuels. For example, algae naturally produce triglycerides as energy storage molecules, and certain biofuel-related technologies are presently focused on the use of algae as a feedstock for biofuels. Algae are photosynthetic organisms, and the use of triglyceride-producing organisms such as algae provides the ability to produce biodiesel from sunlight, water, CO₂, macronutrients, and micronutrients. Algae, however, cannot be readily genetically manipulated, and produce much less oil (i.e., triglycerides, fatty acids) under culture conditions than in the wild.

[0009] Like algae, Cyanobacteria obtain energy from photosynthesis, utilizing chlorophyll A and water to reduce CO₂. Certain Cyanobacteria can produce metabolites, such as carbohydrates, proteins, and fatty acids, from just sunlight, water, CO₂, water, and inorganic salts. Unlike algae, Cyanobacteria can be genetically manipulated. For example, Synechococcus is a genetically manipulable, oligotrophic Cyanobacterium that thrives in low nutrient level conditions, and in the wild accumulates fatty acids in the form of lipid membranes to about 10% by dry weight. Cyanobacteria such as Synechococcus, however, produce no triglyceride energy storage molecules, since Cyanobacteria typically lack the essential enzymes involved in triglyceride synthesis. Instead, Synechococcus in the wild typically accumulates glycogen as its primary carbon storage form.

[0010] Clearly, therefore, there is a need in the art for modified photosynthetic microorganisms, including Cyanobacteria, capable of producing lipids such as triglycerides and fatty acids, e.g., to be used as feed stock in the production of biofuels and/or various specialty chemicals.

### BRIEF SUMMARY

[0011] Embodiments of the present invention relate generally to diacylglyceroltransferase (DGAT) fusion polypeptides, comprising a DGAT polypeptide fused to a heterologous intracellular localization domain.

[0012] In certain embodiments, the intracellular localization domain is fused to the N-terminus of the DGAT polypeptide. In particular embodiments, the intracellular localization domain is fused to an internal region of the DGAT polypeptide. In some embodiments, the internal region is within about 2-100 amino acids of the N-terminus of the DGAT polypeptide. In specific embodiments, the internal region is within about 2-5 amino acids of the N-terminus of the DGAT polypeptide.

[0013] In certain embodiments, the intracellular localization domain is a thylakoid-, vesicle-, lipid body-, glycogen granule-, polyhydroxybutyrate (PHB) body-, carboxysome-, and/or cyanophycin granule-targeting domain. In some instances, the intracellular localization domain selectively localizes DGAT to the cytoplasmic side of the thylakoid, vesicle, lipid body, glycogen granule, PHB body, carboxysome, and/or cyanophycin granule.

[0014] In certain embodiments, the intracellular localization domain is a bacterial membrane-targeting domain. In particular embodiments, the intracellular localization domain is a bacterial plasma membrane (PM)-targeting domain. In certain aspects, the membrane-targeting domain or PM-targeting domain selectively localizes DGAT to the cytoplasmic side of the membrane.

[0015] In certain embodiments, the bacterial PM-targeting domain comprises an amino acid sequence of at least one N-terminal signal sequence from a bacterial plasma membrane protein. In some embodiments, the bacterial PM-targeting domain comprises an amino acid sequence of at least one transmembrane domain (TMD) from a bacterial plasma membrane protein. In particular embodiments, the bacterial PM-targeting domain comprises an amino acid sequence of at least one signal sequence and at least one transmembrane domain (TMD) from a bacterial plasma membrane protein, and where the N-terminal signal sequence and the TMD are optionally from the same bacterial plasma membrane protein.

[0016] In some embodiments, the bacterial plasma membrane protein is characterized by having at least one C-terminal domain that is localized to the cytoplasmic side of a bacterial plasma membrane. In particular embodiments, the bacterial membrane protein is an integral membrane protein (IMP). In some embodiments, the IMP is a transmembrane protein (TP). In certain embodiments, the IMP is an integral membrane chemoreceptor.

[0017] In particular embodiments, the integral membrane chemoreceptor is a methyl-accepting chemotaxis protein (MCP). The MCP is encoded by PCC7942-0858 or PCC7942-1015 from S. elongatus. In some embodiments, the bacterial PM-targeting domain consists essentially of the N-terminal signal sequence and the two N-terminally proximal TMDs of the MCP encoded by PCC7942-0858. In specific embodiments, the bacterial PM-targeting domain consists essentially of about the N-terminal 43-53 amino acids of the MCP encoded by PCC7942-0858. In still other embodiments, the bacterial PM-targeting domain consists essentially of the N-terminal 136-141 amino acids of the MCP encoded by PCC7942-0858.

[0018] In some embodiments, the DGAT polypeptide is an Acinetobacter DGAT, a Streptomyces DGAT, or an Alcanivorax DGAT.

[0019] Certain DGAT fusion polypeptides comprise a peptide linker that separates the DGAT polypeptide and the intracellular localization domain. In some embodiments, the peptide linker is physiologically stable. In particular embodiments, the peptide linker is about 1-200 amino acids, 1-150 amino acids, 1-100 amino acids, 1-90 amino acids, 1-80 amino acids, 1-70 amino acids, 1-60 amino acids, 1-50 amino acids, 1-40 amino acids, 1-30 amino acids, 1-20 amino acids, 1-10 amino acids, or 1-5 amino acids in length. In specific embodiments, the peptide linker is about 1, 2, 3, 4, 5, 6, 7, 8, 9, 10, 11, 12, 13, 14, 15, 16, 17, 18, 19, 20, 21, 22, 23, 24, 25, 26, 27, 28, 29, 30, 31, 32, 33, 34, 35, 36, 37, 38, 39, 40, 41, 42, 43, 44, 45, 46, 47, 48, 49, 50, 60, 70, 80, 90, or 100 amino acids in length.

[0020] Also included are isolated polynucleotides that encodes the DGAT fusion polypeptide described herein, and vectors that comprise such polynucleotides, for instance, where the polynucleotide is operably linked to one or more regulatory elements. In some embodiments, said one or more regulatory elements comprise an inducible promoter.

[0021] Also included are modified photosynthetic microorganisms, comprising one or more introduced polynucleotides encoding a DGAT fusion polypeptide described herein. In some embodiments, the modified photosynthetic microorganism produces triacylglycerols (TAGs), wax esters (WEs), free fatty acids (FFAs), or any combination thereof.

[0022] In certain embodiments, the modified photosynthetic microorganism further comprises one or more overexpressed acyl carrier proteins (ACP), acyl-ACP synthetases (Aas), or both.

[0023] In particular embodiments, the modified photosynthetic microorganism further comprises one or more overexpressed acyl-acyl carrier protein (acyl-ACP) reductases and one or more overexpressed alcohol dehydrogenases, and selectively produces wax esters, free fatty acids, or both, relative to triacylglycerols. In specific embodiments, the overexpressed acyl-ACP reductase is encoded by Synechococcus elongatus PCC7942 (orf1594) or Synechocystis sp. PCC6803 (orfsll0209). In particular embodiments, the overexpressed alcohol dehydrogenase is encoded by slr1192 from Synechocystis or ACIAD3612 from Acinetobacter baylyii.

[0024] Certain modified photosynthetic microorganisms further comprise reduced expression and/or activity of one or more genes encoding an endogenous aldehyde dehydrogenase, an endogenous aldehyde decarbonylase, or both. In specific embodiments, the photosynthetic microorganism is Synechococcus elongatus PCC7942, the aldehyde dehydrogenase is encoded by orf0489, and the aldehyde decarbonylase is encoded by orf1593.

[0025] In some modified photosynthetic microorganisms described herein, the introduced polynucleotide encoding the DGAT fusion polypeptide is operably linked to an inducible promoter.

[0026] In particular embodiments, the photosynthetic microorganism is a Cyanobacterium. In specific embodiments, the Cyanobacterium is S. elongatus. In some aspects, the modified Cyanobacterium has increased growth and/or reduced cellular toxicity relative to a differently modified Cyanobacterium, where the differently modified Cyanobacterium expresses a corresponding DGAT but not a DGAT fused to a heterologous intracellular localization domain. In certain instances, the differently modified Cyanobacterium expresses a wild-type DGAT, and no other form of DGAT.

[0027] Also included are methods for modifying a photosynthetic microorganism, comprising introducing into the photosynthetic microorganism an isolated polynucleotide that encodes a DGAT fusion polypeptide described herein.

[0028] Certain embodiments include methods for production of lipids, comprising culturing a modified photosynthetic microorganism described herein. In some embodiments, said culturing comprises inducing expression of the DGAT fusion polypeptide. Certain of these and related methods comprise the production of triacylglycerols, wax esters, free fatty acids, or any combination thereof.

### BRIEF DESCRIPTION OF THE DRAWINGS

[0029] FIG. 1 shows the domain orientation of S. elongatus methyl-accepting chemotaxis protein PCC7942_{—}0858. SS represents the N-terminal signal sequence from PCC7942_0858.

[0030] FIG. 2 shows the domain orientation of three different DGAT-GFP fusion proteins having a membrane-targeting or plasma membrane (PM)-targeting domain at the N-terminus (SS-DGAT-GFP). The membrane-targeting domain in these constructs is taken from the N-terminal signal sequence (SS) of methyl-accepting chemotaxis protein PCC7942_{—}0858.

[0031] FIG. 3 shows that expression of all DGAT-GFP and SS-DGAT-GFP fusion proteins can be detected by flow cytometry.

[0032] FIG. 4 shows that the growth phenotype of SS-DGAT-GFP-expressing Cyanobacteria is significantly improved relative to the growth phenotype of DGAT-GFP-expressing Cyanobacteria.

[0033] FIG. 5 shows that DGAT modified to contain the N-terminal signal sequence from PCC7942_{—}0858 retains the ability to produce triacylglycerols (TAG) in Cyanobacteria. 1 OD of cells was loaded/lane and run in non-polar solvent. TAG was detected in all samples. FFA were detected only in DGAT-GFP samples (No SS). No IPTG (−), Induced with IPTG (+).

[0034] FIG. 6 shows that fusion of SS30 sequences to DGAT-GFP significantly improves the growth phenotype associated with DGAT induction in acyl carrier protein (ACP)-overexpressing S. elongatus.

[0035] FIG. 7 shows high-level triacylglycerol (TAG) production by S. elongatus co-transformed with SS30-DGAT-GFP and ACP genes under the control of an inducible promoter (Ptrc).

[0036] FIG. 8 shows the domain orientation of three different ADGAT fusion proteins having a membrane-targeting or plasma membrane (PM)-targeting domain at the N-terminus (SS30-ADGAT, SS48-TMD-ADGAT, TMD-ADGAT). The membrane-targeting domains in these constructs are taken from the N-terminal signal-containing sequence (SS) and/or the transmembrane domain (TMD)-containing sequences of methyl-accepting chemotaxis protein PCC7942_0858.

[0037] FIG. 9 shows that fusion of N-terminal signal (SS)-containing sequences and/or transmembrane domain (TMD)-containing sequences to ADGAT significantly improves the growth phenotype associated with DGAT induction in acyl carrier protein (ACP)-overexpressing S. elongatus. No IPTG (−), induced with IPTG (+).

[0038] FIG. 10 shows that Cyanobacteria expressing SS30-ADGAT, SS48-TMD-ADGAT, and TMD-ADGAT fusion proteins retain the ability to produce triacylglycerols (TAG) in Cyanobacteria. 0.5 OD of cells was loaded in each lane and run in non-polar solvent. TAG was detected in all samples. No IPTG (−), induced with IPTG (+), 48 hrs post-induction.

[0039] FIG. 11 shows that Cyanobacteria expressing SS30-ADGAT, SS48-TMD-ADGAT, and TMD-ADGAT fusion proteins retain the ability to produce triacylglycerols (TAG) in Cyanobacteria. 0.5 OD of cells was loaded in each lane and run in non-polar solvent. TAG was detected in all samples. No IPTG (−), induced with IPTG (+), 72 hrs post-induction.

### DETAILED DESCRIPTION

[0040] The present invention is based, in part, on the surprising discovery that fusion of the transmembrane domain (TMD) sequences and/or N-terminal signal sequence from methyl-accepting chemotaxis protein PCC7942_{—}0858 to the N-terminus of recombinantly-expressed diacylglyceroltransferase (DGAT) improves the cell growth characteristics of DGAT-expressing photosynthetic microorganisms, such as Cyanobacteria. This discovery significantly improves the utility of such microorganisms in the production of lipids, especially triglycerides and wax esters.

[0041] According to one non-limiting theory, recombinant expression of wild-type DGAT reduces the growth phenotype of certain photosynthetic microorganisms, such as certain Cyanobacteria, for instance, by disrupting photosynthetic processes and/or by generating oxidative stress via production of reactive oxygen species, among other possible mechanisms. As one non-limiting possibility, wild-type DGAT may randomly disperse throughout the cytoplasm in a way that adversely affects its substrate specificity. According to other non-limiting possibilities, wild-type DGAT may selectively localize to the thylakoid membranes of photosynthetic microorganisms, that is, the sites of photosynthesis, and/or associate with thylakoid or other cell membranes in a way that adversely affects its substrate specificity. Regardless, the fusion of DGAT to a heterologous intracellular localization domain that selectively localizes DGAT to at least one intracellular region (e.g., a membrane) in a way that allows the enzymatic portions of DGAT to interact with lipid-producing substrates in the cytoplasm, not only reduces these potential adverse effects on cell growth but also retains the ability of DGAT to generate lipids such as triglycerides and wax esters. The DGAT polypeptides described herein can thus be fused to essentially any intracellular localization domain that accomplishes this result, such as a membrane-targeting domain. In specific instances, the membrane-targeting domain is composed of at least one signal sequence (e.g., N-terminal signal sequence), transmembrane domain, and/or integral membrane domain from a bacterial membrane protein.

[0042] Embodiments of the present invention therefore include isolated diacylglyceroltransferase (DGAT) fusion polypeptides, comprising a DGAT polypeptide fused to a heterologous intracellular localization domain, such as a domain that selectively localizes DGAT to the plasma membrane, one or more intracellular membrane(s), and/or to one or more intracellular region(s), such as a thylakoid, vesicle, lipid body, glycogen granule, PHB body, carboxysome, and/or cyanophycin granule. In particular aspects, the intracellular localization domain is a bacterial membrane-targeting domain, such as a bacterial plasma membrane (PM)-targeting domain. Also included are polynucleotides that encode the DGAT fusion polypeptides described herein, modified photosynthetic microorganisms that comprise such polynucleotides and polypeptides, related methods of generating such modified photosynthetic microorganisms, and related methods of producing lipids therefrom.

[0043] Embodiments of the present invention may also be combined with the discovery that overexpression of certain genes involved in lipid biosynthesis lead to higher levels of lipid biosynthesis. Thus, in certain embodiments, modified photosynthetic microorganisms, e.g., Cyanobacteria, used according to the present invention further comprise one or more exogenous (i.e., introduced) or overexpressed nucleic acids that encode a lipid biosynthesis protein, e.g., a polypeptide having an activity associated with triglyceride biosynthesis or fatty acid biosynthesis, including but not limited to any of those described herein. Specific examples of lipid biosynthesis proteins include acyl carrier protein (ACP), acyl-ACP synthetase (Aas), acyl-ACP reductase, thioesterases or acyl-ACP thioesterases (TES) such as TesA or FatB, acetyl coenzyme A carboxylases (ACCase), phosphatidic acid phosphatases (PAP; or phosphatidate phosphatases), triacylglycerol (TAG) hydrolases or lipases, fatty acyl-CoA synthetases, lipases, and phospholipases (PL) such as phospholipase A, B, or C, among others described herein.

[0044] As one example, embodiments of the present invention may be combined with the discovery that photosynthetic microorganisms, e.g., Cyanobacteria, modified to overexpress an acyl carrier protein (ACP), an acyl-ACP synthetase (Aas), or both, optionally in combination with one or more additional lipid biosynthesis proteins such as a thioesterase, produce increased amounts of lipids, e.g., triglycerides, free fatty acids, and/or wax esters, and often demonstrate an increase in total cellular lipid content, as described in International Patent Application PCT/US2011/065938. As another example, the incorporation of one or more introduced or overexpressed PAP polypeptides may increase the production of triglycerides in any of the embodiments described herein. Here, PAP catalyzes the production of diacylglycerol molecules, an immediate pre-cursor to triglycerides, and thus increases the availability of pre-cursors for the DGAT fusion proteins described herein, which then catalyze the final step of triglyceride synthesis by converting the diacylglycerol precursors to triglycerides.

[0045] Aspects of the present invention can also be combined with the discovery that photosynthetic microorganisms such as Cyanobacteria can be genetically modified in more particular ways, for instance, to increase the production of fatty acids. Since fatty acids provide the starting material for triglycerides, increasing the production of fatty acids in genetically modified photosynthetic microorganisms may be utilized to increase the production of triglycerides, as described herein and in International Patent Application PCT/US2009/061936 and U.S. patent application Ser. No. 12/605,204 (incorporated by reference). Photosynthetic microorganisms of the present invention can be modified to increase the production of fatty acids by introducing one or more exogenous polynucleotide sequences that encode one or more enzymes associated with fatty acid synthesis. Examples of such enzymes include acyl-ACP reductases and ACCases, among others described herein.

[0046] Embodiments of the present invention may also be combined with the discovery that the co-expression of an acyl-ACP reductase, alcohol dehydrogenase, and a wax ester synthase results in wax ester formation, via the acyl-ACP=>fatty aldehyde pathway. For instance, Cyanobacteria over-expressing an acyl-ACP reductase (e.g., orf1594), a long chain alcohol dehydrogenase, and a bi-functional DGAT enzyme (e.g., aDGAT) not only produce fewer triglycerides, but also produce wax esters, as described in International Patent Application PCT/2011/065896. Because these modified Cyanobacteria produce free fatty acids, and thus suggest that endogenous aldehyde dehydrogenase encoded by orf0489 competes with alcohol dehydrogenase for acyl aldehyde substrate, reduced expression (e.g., deletion) of orf0489 may further increase wax ester synthesis in these and related microorganisms, relative to modified microorganisms having no reduced expression of orf0489. Further, because aldehyde decarbonylase encoded by orf1593 may also compete with alcohol dehydrogenase for acyl aldehyde substrate, reduced expression (e.g., deletion) of orf1593 may independently increase wax ester synthesis, and when combined with reduced expression of orf0489 may even further increase wax ester synthesis. Increased wax ester formation may also be achieved by combining any one of these or related embodiments with overexpression of other genes related to fatty aldehyde synthesis, including, for example, ACP, Aas, or both.

[0047] Aspects of the present invention may also be combined with the discovery that the functional removal of certain genes involved in glycogen synthesis, such as by mutation (e.g., full or partial deletion), leads to reduced glycogen accumulation and/or storage in photosynthetic microorganisms, such as Cyanobacteria, as described in International Patent Application No. PCT/US2009/069285 and U.S. patent application Ser. No. 12/645,228. For instance, Cyanobacteria, such as Synechococcus, which contain deletions of the glucose-1-phosphate adenylyltransferase gene (glgC), the phosphoglucomutase gene (pgm), and/or the glycogen synthase gene (glgA), individually or in various combinations, may produce and accumulate significantly reduced levels of glycogen as compared to wild-type Cyanobacteria. The reduction of glycogen accumulation may be especially pronounced under stress conditions, including the reduction of nitrogen.

[0048] Aspects of the present invention may also be combined with the discovery that overexpression of genes or proteins involved in glycogen breakdown in photosynthetic microorganisms, such as Cyanobacteria, likewise leads to reduced glycogen and/or storage. Exemplary glycogen breakdown proteins include glycogen phosphorylase (GlgP), glycogen isoamylase (GlgX), glucanotransferase (MalQ), phosphoglucomutase (Pgm), glucokinase (Glk), and phosphoglucose isomerase (Pgi).

[0049] Other combinations will be apparent to persons skilled in the art based on the description provided herein.

### A. DEFINITIONS

[0050] Unless defined otherwise, all technical and scientific terms used herein have the same meaning as commonly understood by those of ordinary skill in the art to which the invention belongs. Although any methods and materials similar or equivalent to those described herein can be used in the practice or testing of the present invention, preferred methods and materials are described. For the purposes of the present invention, the following terms are defined below.

[0051] All publications, patents and patent applications cited herein are hereby incorporated by reference in their entirety.

[0052] The articles “a” and “an” are used herein to refer to one or to more than one (i.e. to at least one) of the grammatical object of the article. By way of example, “an element” means one element or more than one element.

[0053] By “about” is meant a quantity, level, value, number, frequency, percentage, dimension, size, amount, weight or length that varies by as much as 30, 25, 20, 15, 10, 9, 8, 7, 6, 5, 4, 3, 2 or 1% to a reference quantity, level, value, number, frequency, percentage, dimension, size, amount, weight or length.

[0054] The terms “biologically active fragment” and “biologically active variant” as applied to fragments and variants of a reference polynucleotide or polypeptide sequence, refers to a fragment and/or variant that has at least about 0.1, 0.5, 1, 2, 5, 10, 12, 14, 16, 18, 20, 22, 24, 26, 28, 30, 35, 40, 45, 50, 55, 60, 65, 70, 75, 80, 85, 90, 95, 96, 97, 98, 99, 100, 110, 120, 150, 200, 300, 400, 500, 600, 700, 800, 900, 1000% or more of the activity of a reference sequence. Representative biologically active fragments and variants generally participate in an interaction, e.g., an intra-molecular or an inter-molecular interaction. An inter-molecular interaction can be a specific binding interaction or an enzymatic interaction, described elsewhere herein. In certain embodiments, a biologically active fragment or variant comprises a conserved enzymatic sequence, domain, or motif, as described elsewhere herein and known in the art. Suitably, the biologically-active fragment has no less than about 1%, 10%, 25%, 50% of an activity of the wild-type polypeptide from which it is derived.

[0055] By “coding sequence” is meant any nucleic acid sequence that contributes to the code for the polypeptide product of a gene. By contrast, the term “non-coding sequence” refers to any nucleic acid sequence that does not contribute to the code for the polypeptide product of a gene.

[0056] Throughout this specification, unless the context requires otherwise, the words “comprise,” “comprises,” and “comprising” will be understood to imply the inclusion of a stated step or element or group of steps or elements but not the exclusion of any other step or element or group of steps or elements.

[0057] By “consisting of” is meant including, and limited to, whatever follows the phrase “consisting of.” Thus, the phrase “consisting of” indicates that the listed elements are required or mandatory, and that no other elements may be present.

[0058] By “consisting essentially of” is meant including any elements listed after the phrase, and limited to other elements that do not interfere with or contribute to the activity or action specified in the disclosure for the listed elements. Thus, the phrase “consisting essentially of” indicates that the listed elements are required or mandatory, but that other elements are optional and may or may not be present depending upon whether or not they affect the activity or action of the listed elements.

[0059] The terms “complementary” and “complementarity” refer to polynucleotides (i.e., a sequence of nucleotides) related by the base-pairing rules. For example, the sequence “A-G-T,” is complementary to the sequence “T-C-A.” Complementarity may be “partial,” in which only some of the nucleic acids' bases are matched according to the base pairing rules. Or, there may be “complete” or “total” complementarity between the nucleic acids. The degree of complementarity between nucleic acid strands has significant effects on the efficiency and strength of hybridization between nucleic acid strands.

[0060] By “corresponds to” or “corresponding to” is meant (a) a polynucleotide having a nucleotide sequence that is substantially identical or complementary to all or a portion of a reference polynucleotide sequence or encoding an amino acid sequence identical to an amino acid sequence in a peptide or protein; or (b) a peptide or polypeptide having an amino acid sequence that is substantially identical to a sequence of amino acids in a reference peptide or protein.

[0061] By “derivative” is meant a polypeptide that has been derived from the basic sequence by modification, for example by conjugation to or complexing with other chemical moieties (e.g., pegylation) or by post-translational modification techniques as would be understood in the art. The term “derivative” also includes within its scope alterations that have been made to a parent sequence including additions or deletions that provide for functionally equivalent molecules.

[0062] By “enzyme reactive conditions” is meant that any necessary conditions are available in an environment (i.e., such factors as temperature, pH, lack of inhibiting substances) which will permit the enzyme to function. Enzyme reactive conditions can be either in vitro, such as in a test tube, or in vivo, such as within a cell.

[0063] As used herein, the terms “function” and “functional” and the like refer to a biological, enzymatic, or therapeutic function.

[0064] A “fusion protein” or “fusion polypeptide” refers to a polypeptide that is created through the joining of two or more coding sequences, which originally coded for separate polypeptides or domains thereof; translation of the joined coding sequences results in a single, fusion polypeptide, typically with functional properties derived from each of the separate polypeptides or domains.

[0065] By “gene” is meant a unit of inheritance that occupies a specific locus on a chromosome and consists of transcriptional and/or translational regulatory sequences and/or a coding region and/or non-translated sequences (i.e., introns, 5′ and 3′ untranslated sequences).

[0066] The term “host cell” includes an individual cell or cell culture which can be or has been a recipient of any recombinant vector(s) or isolated polynucleotide of the invention. Host cells include progeny of a single host cell, and the progeny may not necessarily be completely identical (in morphology or in total DNA complement) to the original parent cell due to natural, accidental, or deliberate mutation and/or change. A host cell includes cells transfected or infected in vivo or in vitro with a recombinant vector or a polynucleotide of the invention. A host cell which comprises a recombinant vector of the invention is a recombinant host cell.

[0067] “Homology” refers to the percentage number of amino acids that are identical or constitute conservative substitutions. Homology may be determined using sequence comparison programs such as GAP (Deveraux et al., Nucleic Acids Research. 12, 387-395, 1984, incorporated by reference). In this way sequences of a similar or substantially different length to those cited herein could be compared by insertion of gaps into the alignment, such gaps being determined, for example, by the comparison algorithm used by GAP.

[0068] By “isolated” is meant material that is substantially or essentially free from components that normally accompany it in its native state. For example, an “isolated polynucleotide”, as used herein, refers to a polynucleotide, which has been purified from the sequences which flank it in a naturally-occurring state, e.g., a DNA fragment which has been removed from the sequences that are normally adjacent to the fragment. Alternatively, an “isolated peptide” or an “isolated polypeptide” and the like, as used herein, refer to in vitro isolation and/or purification of a peptide or polypeptide molecule from its natural cellular environment, and from association with other components of the cell.

[0069] The terms “modulating” and “altering” include “increasing” and “enhancing” as well as “decreasing” or “reducing,” typically in a statistically significant or a physiologically significant amount or degree relative to a control. By “increased” or “increasing” is included the ability of one or more modified photosynthetic microorganisms (e.g., Cyanobacteria) to grow or multiply and/or produce or store a greater amount of a given lipid, such as a fatty acid, wax ester, or triglyceride, relative to a control photosynthetic microorganism, typically of the same species, such as an unmodified photosynthetic microorganism or a differently modified photosynthetic microorganism.

[0070] In certain embodiments, a differently modified photosynthetic microorganism includes a microorganism that express a biologically active DGAT polypeptide, but not a DGAT that selectively localizes to a defined intracellular region. For instance, a differently modified microorganism could express an active DGAT that disperses throughout the cytoplasm, relative to selective localization at one or intracellular regions (e.g., intracellular membrane, thylakoid, vesicle, lipid body, glycogen granule, PHB body, carboxysome, cyanophycin granule, cytoplasmic side of the plasma membrane), and no other form of DGAT. In some embodiments, a differently modified photosynthetic microorganism includes a microorganism that expresses a biologically active DGAT polypeptide that selectively localizes to one or more intracellular region(s) relative to other intracellular region(s). For instance, a differently modified photosynthetic microorganism could express a DGAT that selectively localizes to thylakoid membranes, relative to the plasma membrane or other membrane, and no other form of DGAT. In specific embodiments, a differently modified photosynthetic microorganism expresses DGAT without a heterologous intracellular localization domain such as a membrane-targeting domain (for example, a wild-type DGAT), and no other forms of DGAT.

[0071] Certain aspects include increases in total lipids, including total triglycerides, total wax esters, and total fatty acids, separately or together. Some aspects include increases in total free fatty acids, total intracellular fatty acids, and/or total secreted fatty acids, separately or together. In certain embodiments, total lipids may increase, with either corresponding increases in all types of lipids, or relative increases in only one or more specific types of lipid (e.g., fatty acids, free fatty acids, secreted fatty acids, triglycerides, wax esters). In certain embodiments, total lipids may stay the same (e.g., total lipids are not significantly increased compared to an unmodified microorganism of the same type) or even decrease, and the production or storage of one or more particular lipid(s) may increase relative to other lipids (e.g., fatty acids, free fatty acids, secreted fatty acids, triglycerides, wax esters).

[0072] In some embodiments, the production or storage of triglycerides increases relative to other lipids, such as fatty acids and/or wax esters. In certain embodiments, the production or storage of wax esters increases relative to other lipids, such as triglycerides and/or fatty acids. In particular embodiments, the production or storage of one or more selected types of fatty acids (e.g., secreted fatty acids, free fatty acids, intracellular fatty acids, specific fatty acids such as C14:0, C14:1, C16:0, C16:1n9, and C18:0 fatty acids) may increase relative to other types of fatty acids (e.g., secreted fatty acids, free fatty acids, intracellular fatty acids, specific fatty acids such as C14:0, C14:1, C16:0, C16:1n9, and C18:0 fatty acids) or lipids.

[0073] An “increased” or “enhanced” amount is typically a “statistically significant” amount, and may include an increase that is 1.1, 1.2, 1.5, 1.7, 2, 2.5, 3, 3.5, 4, 4.5, 5, 6, 7, 8, 9, 10, 15, 20, 30 or more times (e.g., 100, 500, 1000 times) (including all integers and decimal points in between and above 1, e.g., 1.5, 1.6, 1.7. 1.8, etc.) the cell growth and/or the amount of lipid produced by an unmodified microorganism or a differently modified microorganism, typically of the same species. In some embodiments, cell growth and/or production or storage of total lipids, total triglycerides, total fatty acids, total free fatty acids, selected fatty acids, total intracellular fatty acids, total secreted fatty acids, and/or total wax esters is increased relative to an unmodified or differently modified microorganism, as described herein, by at least 10%, at least 15%, at least 20%, at least 25%, at least 30%, at least 40%, at least 50%, at least 60%, at least 70%, at least 80%, at least 90%, at least 100%, at least 150%, at least 200%, at least 300%, at least 400%, at least 500%, or at least 1000%. In certain embodiments, cell growth and/or production or storage of total lipids, total triglycerides, total fatty acids, total free fatty acids, total intracellular fatty acids, total secreted fatty acids, and/or total wax esters is increased by about 50% to 200%. Such increases can be observed or measured over time, for instance, at about 24, 36, 48, 60, 72, 96, 108, 120, 132, 144, 156, 168, 180, 192 or more hours, for example, post-induction of DGAT expression (e.g., comparing Cyanobacteria that expresses a membrane-targeting domain-DGAT fusion protein relative to Cyanobacteria that expresses only a wild-type DGAT or a DGAT without the membrane-targeting domain).

[0074] Production of lipids such as fatty acids can be measured according to techniques known in the art, such as Nile Red staining, thin layer chromatography and gas chromatography. Production of triglycerides can be measured, for example, using commercially available enzymatic tests, including colorimetric enzymatic tests using glycerol-3-phosphate-oxidase. Production of free fatty acids can be measured in absolute units such as overall accumulation of FAMES (e.g., OD/ml, μg/m) or in units that reflect the production of FAMES over time, i.e., the rate of FAMES production (e.g., OD/ml/day, μg/ml/day). For example, certain modified microorganisms described herein may produce at least about 20, 21, 22, 23, 24, 25, 26, 27, 28, 29, 30, 31, 32, 33, 34, 35, 36, 37, 38, 39, 40, 41, 42, 43, 44, 45, 46, 47, 48, 49, 50 μg/mL/day; and/or in the range of at least about 20-30, 20-35, 20-40, 20-45, 20-50, 25-30, 25-35, 25-40, 25-45, 25-50, 30-35, 30-40, 30-45, 30-50, 35-40, 35-45, 35-50, 40-45, or 40-50 μg/mL/day. Production of TAGs can be measured similarly.

[0075] In certain instances, by “decreased” or “reduced” is included the ability of one or more modified photosynthetic microorganisms, e.g., Cyanobacteria, to produce or accumulate a lesser amount (e.g., a statistically significant amount) of a given carbon-based product, such as glycogen, relative to a control photosynthetic microorganism, such as an unmodified Cyanobacteria or a differently modified Cyanobacteria. Production of glycogen and related molecules can be measured according to techniques known in the art, as exemplified herein (see Suzuki et al., Biochimica et Biophysica Acta 1770:763-773, 2007). In certain instances, by “decreased” or “reduced” is meant a lesser level of expression, by a modified photosynthetic microorganism, e.g., Cyanobacteria, of one or more genes or proteins of interest (e.g., protein associated with a glycogen biosynthesis or storage pathway, aldehyde decarbonylase, aldehyde dehydrogenase, Aas), relative to the level of expression in a control photosynthetic microorganism, such as an unmodified Cyanobacteria or a differently modified Cyanobacteria. In particular embodiments, production or accumulation of a carbon-based product, or expression of one or more genes or proteins of interest is reduced by a “statistically significant” amount, for instance, by at least 10%, at least 20%, at least 30%, at least 40%, at least 50%, at least 60%, at least 70%, at least 80%, at least 90%, or 100%. In particular embodiments, production or accumulation of a carbon-based product, or expression of one or more proteins or genes is reduced by about 50-100%.

[0076] In certain aspects, a targeted gene may be rendered “non-functional” by changes or mutations at the nucleotide level that alter the amino acid sequence of the encoded polypeptide, such that a modified polypeptide is expressed, but which has reduced function or activity with respect to glycogen biosynthesis or storage, whether by modifying that polypeptide's active site, its cellular localization, its stability, or other functional features apparent to a person skilled in the art. Such modifications to the coding sequence of a polypeptide may be accomplished according to known techniques in the art, such as site directed mutagenesis at the genomic level and/or natural selection (e.g., directed evolution) of a given photosynthetic microorganism.

[0077] By “obtained from” is meant that a sample such as, for example, a polynucleotide or polypeptide is isolated from, or derived from, a particular source, such as a desired organism or a specific tissue within a desired organism. “Obtained from” can also refer to the situation in which the sequence information of a polynucleotide or polypeptide is isolated from, or derived from, the sequence of a particular polynucleotide or polypeptide from a desired organism. For example, a polynucleotide sequence encoding a plasma membrane-targeting domain, a DGAT polypeptide, acyl-ACP reductase, ACP, Aas, acyl-CoA synthetase, glycogen breakdown protein, aldehyde dehydrogenase, alcohol dehydrogenase, and/or acetyl-CoA carboxylase enzyme, among others described herein, may be isolated or obtained from a variety of prokaryotic or eukaryotic organisms, or from particular tissues or cells within certain eukaryotic organism.

[0078] The term “operably linked” as used herein means placing a gene under the regulatory control of a promoter, which then controls the transcription and optionally the translation of the gene. In the construction of heterologous promoter/structural gene combinations, it is generally preferred to position the genetic sequence or promoter at a distance from the gene transcription start site that is approximately the same as the distance between that genetic sequence or promoter and the gene it controls in its natural setting; i.e. the gene from which the genetic sequence or promoter is derived. As is known in the art, some variation in this distance can be accommodated without loss of function. Similarly, the preferred positioning of a regulatory sequence element with respect to a heterologous gene to be placed under its control is defined by the positioning of the element in its natural setting; i.e., the gene from which it is derived. “Constitutive promoters” are typically active, i.e., promote transcription, under most conditions. “Inducible promoters” are typically active only under certain conditions, such as in the presence of a given molecule factor (e.g., IPTG) or a given environmental condition (e.g., particular CO₂ concentration, nutrient levels, light, heat). In the absence of that condition, inducible promoters typically do not allow significant or measurable levels of transcriptional activity. For example, inducible promoters may be induced according to temperature, pH, a hormone, a metabolite (e.g., lactose, mannitol, an amino acid), light (e.g., wavelength specific), osmotic potential (e.g., salt induced), a heavy metal, or an antibiotic. Numerous standard inducible promoters will be known to one of skill in the art.

[0079] The recitation “polynucleotide” or “nucleic acid” as used herein designates mRNA, RNA, cRNA, rRNA, cDNA or DNA. The term typically refers to polymeric form of nucleotides of at least 10 bases in length, either ribonucleotides or deoxynucleotides or a modified form of either type of nucleotide. The term includes single and double stranded forms of DNA and RNA.

[0080] With regard to polynucleotides, the term “exogenous” refers to a polynucleotide sequence that does not naturally-occur in a wild type cell or organism, but is typically introduced into the cell by molecular biological techniques. Examples of exogenous polynucleotides include vectors, plasmids, and/or man-made nucleic acid constructs encoding a desired protein. Also included are exogenous regulatory elements, including exogenous promoters, which can be used to modulate the expression of an endogenous polynucleotide sequence.

[0081] With regard to polynucleotides, the term “endogenous” or “native” refers to naturally-occurring polynucleotide sequences that may be found in a given wild type cell or organism. For example, certain Cyanobacterial species do not typically contain a DGAT gene, and, therefore, do not comprise an “endogenous” polynucleotide sequence that encodes a DGAT polypeptide. Also, a particular polynucleotide sequence that is isolated from a first organism and transferred to second organism by molecular biological techniques is typically considered an “exogenous” polynucleotide with respect to the second organism. In specific embodiments, polynucleotide sequences can be “introduced” by molecular biological techniques into a microorganism that already contains such a polynucleotide sequence, for instance, to create one or more additional copies of an otherwise naturally-occurring polynucleotide sequence, such as a coding sequence or regulatory element, and thereby facilitate overexpression of the encoded polypeptide.

[0082] “Polypeptide,” “polypeptide fragment,” “peptide” and “protein” are used interchangeably herein to refer to a polymer of amino acid residues and to variants and synthetic analogues of the same. Thus, these terms apply to amino acid polymers in which one or more amino acid residues are synthetic non-naturally occurring amino acids, such as a chemical analogue of a corresponding naturally occurring amino acid, as well as to naturally-occurring amino acid polymers. In certain aspects, polypeptides may include enzymatic polypeptides, or “enzymes,” which typically catalyze (i.e., increase the rate of) various chemical reactions.

[0083] “Phosphoglycerides” (or glycerophospholipids) are major lipid components of biological membranes, and include, for example, any derivative of sn-glycero-3-phosphoric acid that contains at least one O-acyl, or O-alkyl or O-alk-1′-enyl residue attached to the glycerol moiety and a polar head made of a nitrogenous base, a glycerol, or an inositol unit. Phosphoglycerides can also be characterized as amphipathic lipids formed by esters of acylglycerols with phosphate and another hydroxylated compound.

[0084] “Reduced nitrogen conditions,” or conditions of “nitrogen limitation,” refer generally to culture conditions in which a certain fraction or percentage of a standard nitrogen concentration is present in the culture media. Such fractions typically include, but are not limited to, about 1/50, 1/40, 1/30, 1/10, ⅕, ¼, or about ½ the standard nitrogen conditions. Such percentages typically include, but are not limited to, less than about 1%, 2%, 3%, 4%, 5%, 6%, 7%, 8%, 9%, 10%, 15%, 20%, 30%, 40%, or 50% the standard nitrogen conditions. “Standard” nitrogen conditions can be estimated, for example, by the amount of nitrogen present in BG11 media, as exemplified herein and known in the art. For instance, BG11 media usually contains nitrogen in the form of NaNO₃ at a concentration of about 1.5 grams/liter (see, e.g., Rippka et al., J. Gen Microbiol. 111:1-61, 1979).

[0085] The term “reference sequence” refers generally to a nucleic acid coding sequence, or amino acid sequence, to which another sequence is being compared. All polypeptide and polynucleotide sequences described herein are included as references sequences, including those described by name (e.g., orf1593, orf0489, orf1594, TesA, ACP, aDGAT, MCP) and those described in the Sequence Listing.

[0086] The recitations “sequence identity” or, for example, comprising a “sequence 50% identical to,” as used herein, refer to the extent that sequences are identical on a nucleotide-by-nucleotide basis or an amino acid-by-amino acid basis over a window of comparison. Thus, a “percentage of sequence identity” may be calculated by comparing two optimally aligned sequences over the window of comparison, determining the number of positions at which the identical nucleic acid base (e.g., A, T, C, G, I) or the identical amino acid residue (e.g., Ala, Pro, Ser, Thr, Gly, Val, Leu, Ile, Phe, Tyr, Trp, Lys, Arg, His, Asp, Glu, Asn, Gln, Cys and Met) occurs in both sequences to yield the number of matched positions, dividing the number of matched positions by the total number of positions in the window of comparison (i.e., the window size), and multiplying the result by 100 to yield the percentage of sequence identity. Included are nucleotides and polypeptides having at least about 50%, 55%, 60%, 65%, 70%, 75%, 80%, 85%, 90%, 95%, 97%, 98%, 99% or 100% sequence identity to any of the reference sequences described herein (see, e.g., Sequence Listing), typically where the polypeptide variant maintains at least one biological activity of the reference polypeptide.

[0087] Terms used to describe sequence relationships between two or more polynucleotides or polypeptides include “reference sequence”, “comparison window”, “sequence identity”, “percentage of sequence identity” and “substantial identity”. A “reference sequence” is at least 12 but frequently 15 to 18 and often at least 25 monomer units, inclusive of nucleotides and amino acid residues, in length. Because two polynucleotides may each comprise (1) a sequence (i.e., only a portion of the complete polynucleotide sequence) that is similar between the two polynucleotides, and (2) a sequence that is divergent between the two polynucleotides, sequence comparisons between two (or more) polynucleotides are typically performed by comparing sequences of the two polynucleotides over a “comparison window” to identify and compare local regions of sequence similarity. A “comparison window” refers to a conceptual segment of at least 6 contiguous positions, usually about 50 to about 100, more usually about 100 to about 150 in which a sequence is compared to a reference sequence of the same number of contiguous positions after the two sequences are optimally aligned. The comparison window may comprise additions or deletions (i.e., gaps) of about 20% or less as compared to the reference sequence (which does not comprise additions or deletions) for optimal alignment of the two sequences. Optimal alignment of sequences for aligning a comparison window may be conducted by computerized implementations of algorithms (GAP, BESTFIT, FASTA, and TFASTA in the Wisconsin Genetics Software Package Release 7.0, Genetics Computer Group, 575 Science Drive Madison, Wis., USA) or by inspection and the best alignment (i.e., resulting in the highest percentage homology over the comparison window) generated by any of the various methods selected. Reference also may be made to the BLAST family of programs as for example disclosed by Altschul et al., 1997, Nucl. Acids Res. 25:3389. A detailed discussion of sequence analysis can be found in Unit 19.3 of Ausubel et al., “Current Protocols in Molecular Biology”, John Wiley & Sons Inc, 1994-1998, Chapter 15.

[0088] The term “signal sequence” refers generally to an amino acid sequence that is present at the N terminus of a protein and targets that protein to a particular location in the cell, for example, the secretory pathway, thylakoid membrane, or plasma membrane. A signal sequence may or may not have a cleavage site which liberates it from the rest of the protein.

[0089] By “statistically significant,” it is meant that the result was unlikely to have occurred by chance. Statistical significance can be determined by any method known in the art. Commonly used measures of significance include the p-value, which is the frequency or probability with which the observed event would occur, if the null hypothesis were true. If the obtained p-value is smaller than the significance level, then the null hypothesis is rejected. In simple cases, the significance level is defined at a p-value of 0.05 or less.

[0090] “Substantially” or “essentially” means nearly totally or completely, for instance, 95%, 96%, 97%, 98%, 99% or greater of some given quantity.

[0091] “Stress conditions” refers to any condition or combination thereof that imposes stress upon the Cyanobacteria, including both environmental, physical and/or genetic stresses, and which reduces biomass accumulation, cell division, or both. Under stress conditions, biomass accumulation and/or cell division of a photosynthetic microorganism can be reduced by at least about 10%, 15%, 20%, 25%, 30%, 35%, 40%, 45%, 50%, 55%, 60%, 65%, 70%, 75%, 80%, 85%, 90%, 95%, 98%, 99%, or 100% relative to a corresponding photosynthetic microorganism under non-stressed conditions.

[0092] Examples of stresses include but are not limited to: reduced or increased temperature as compared to standard; nutrient deprivation, e.g., reduced levels or absence of one or more essential nutrients such as nitrogen, sulfur, phosphorous, and/or phosphate; reduced or increased CO₂ levels as compared to a standard; reduced or increased light exposure, e.g., intensity or duration, as compared to standard; exposure to reduced or increased nitrogen, iron, sulfur, phosphorus, and/or copper as compared to standard; altered pH, e.g., more or less acidic or basic, as compared to standard; altered salt conditions as compared to standard; exposure to an agent that causes DNA synthesis inhibitor or protein synthesis inhibition; increased or decreased culture density as compared to standard; introduced or overexpressed polynucleotides encoding one or more polypeptides associated with reduction of biomass accumulation, cell division, or division as compared to a wild-type photosynthetic microorganism; and altered expression of one or more polypeptides associated with reduction of biomass accumulation, cell division, or division as compared to a wild-type photosynthetic microorganism. Standard growth and culture conditions (e.g., non-stress conditions) for various Cyanobacteria are known in the art.

[0093] As used herein, the term “triglyceride” (triacylglycerol or neutral fat) refers to a fatty acid triester of glycerol. Triglycerides are typically non-polar and water-insoluble.

[0094] “Transformation” refers to the permanent, heritable alteration in a cell resulting from the uptake and incorporation of foreign DNA into the host-cell genome; also, the transfer of an exogenous gene from one organism into the genome of another organism.

[0095] By “vector” is meant a polynucleotide molecule, preferably a DNA molecule derived, for example, from a plasmid, bacteriophage, yeast or virus, into which a polynucleotide can be inserted or cloned. A vector preferably contains one or more unique restriction sites and can be capable of autonomous replication in a defined host cell including a target cell or tissue or a progenitor cell or tissue thereof, or be integrable with the genome of the defined host such that the cloned sequence is reproducible. Accordingly, the vector can be an autonomously replicating vector, i.e., a vector that exists as an extra-chromosomal entity, the replication of which is independent of chromosomal replication, e.g., a linear or closed circular plasmid, an extra-chromosomal element, a mini-chromosome, or an artificial chromosome. The vector can contain any means for assuring self-replication. Alternatively, the vector can be one which, when introduced into the host cell, is integrated into the genome and replicated together with the chromosome(s) into which it has been integrated. Such a vector may comprise specific sequences that allow recombination into a particular, desired site of the host chromosome. A vector system can comprise a single vector or plasmid, two or more vectors or plasmids, which together contain the total DNA to be introduced into the genome of the host cell, or a transposon. The choice of the vector will typically depend on the compatibility of the vector with the host cell into which the vector is to be introduced. In the present case, the vector is preferably one which is operably functional in a photosynthetic microorganism cell, such as a Cyanobacterial cell. The vector can include a reporter gene, such as a green fluorescent protein (GFP), which can be either fused in frame to one or more of the encoded polypeptides, or expressed separately. The vector can also include a selection marker such as an antibiotic resistance gene that can be used for selection of suitable transformants.

[0096] The term “wild-type” refers to a gene or gene product that has the characteristics of that gene or gene product when isolated from a naturally-occurring source. A wild type gene or gene product (e.g., a polypeptide) is that which is most frequently observed in a population and is thus arbitrarily designed the “normal” or “wild-type” form of the gene.

### B. POLYPEPTIDES

[0097] Embodiments of the present invention include diacylglycerol acyltransferase (DGAT) fusion proteins, comprising at least one DGAT polypeptide fused to at least one heterologous intracellular localization domain, such as a bacterial membrane-targeting domain. Such fusion proteins can be partially or fully isolated from other cellular components, or expressed, for example, in cell-free systems or a host cell, such as a modified photosynthetic microorganism.

[0098] Further to comprising a DGAT fusion protein described herein, the modified photosynthetic microorganisms described herein can optionally comprise any combination of one or more overexpressed or introduced lipid biosynthesis proteins and/or one or more overexpressed or introduced proteins associated with glycogen breakdown. Examples of lipid biosynthesis proteins include acyl carrier proteins (ACP), acyl ACP synthases (Aas), acyl-ACP reductases, alcohol dehydrogenases, aldehyde dehydrogenases, aldehyde decarbonylases, thioesterases (TES), acetyl coenzyme A carboxylases (ACCase), phosphatidic acid phosphatases (PAP; or phosphatidate phosphatases), triacylglycerol (TAG) hydrolases, fatty acyl-CoA synthetases, and lipases/phospholipases, as described herein. Exemplary proteins associated with glycogen breakdown are described infra.

[0099] In specific instances, photosynthetic microorganisms may optionally comprise reduced, eliminated, or non-functional expression (e.g., expression of a deletion mutant with reduced or no functional activity) of one or more endogenous lipid biosynthesis proteins. In particular aspects, for example, in the production of wax esters, modified photosynthetic microorganisms such as Synechococcus may optionally comprise reduced, eliminated, or non-functional expression of one or more aldehyde decarbonylases (e.g., orf1593), aldehyde dehydrogenases (e.g., orf0489), or both. In specific aspects, a modified photosynthetic microorganism may optionally comprise reduced, eliminated, or non-functional expression of an Aas polypeptide.

[0100] Any of these modified photosynthetic microorganisms may optionally comprise reduced, eliminated, or non-functional expression of one or more proteins associated with glycogen biosynthesis, either alone or in combination with overexpressed lipid biosynthesis proteins and/or overexpressed glycogen breakdown proteins, or in combination with any other polypeptide-related modification described herein.

[0101] As will be apparent, modified photosynthetic microorganisms of the present invention may comprise any combination of one or more of the additional modifications noted herein, typically as long as they express at least one intracellular localization domain-DGAT fusion protein. It is further understood that the compositions and methods of the present invention may be practiced using biologically active variants and/or fragments of any of the polypeptides described herein.

[0102] (i) Intracellular Localization Domain-DGAT Fusion Proteins

[0103] As noted above, embodiments of the present invention include intracellular localization domain-DGAT “fusion proteins,” comprising at least one DGAT polypeptide fused to at least one heterologous intracellular localization domain, such as a bacterial membrane-targeting domain.

[0104] “Fusion proteins” are defined elsewhere herein and well known in the art, as are methods of making fusion proteins. Fusion proteins may be prepared using standard techniques. For example, DNA sequences encoding the polypeptide components of a desired fusion may be assembled separately, and ligated into an appropriate expression vector. The 3′ end of the DNA sequence encoding one polypeptide component can be ligated, with or without a peptide linker (described below), to the 5′ end of a DNA sequence encoding the second (or third, fourth, etc.) polypeptide component so that the reading frames of the sequences are in phase. This permits translation into a single fusion protein that retains the biological activity of both component polypeptides.

[0105] The ligated DNA sequences may be operably linked to suitable transcriptional or translational regulatory elements. The regulatory elements responsible for expression of DNA are typically located 5′ to the DNA sequence encoding the first polypeptide (e.g., the membrane-targeting domain). Similarly, stop codons required to end translation and transcription termination signals are typically present 3′ to the DNA sequence encoding the second (or third, fourth, etc.) polypeptide.

[0106] In the DGAT fusion proteins described herein, the intracellular localization or targeting domain can be fused to the N-terminus of the DGAT polypeptide, the C-terminus of the DGAT polypeptide, internally, or any combination thereof. For internal fusions, the intracellular localization or targeting domain can be fused to the DGAT polypeptide within the N-terminal region (e.g., within about the first 2, 3, 4, 5, 6, 7, 8, 9, 10, 20, 30, 40, 50, 60, 70, 80, 90, 100 or so amino acids), at an internal region (between the N-terminal and C-terminal regions), and/or within the C-terminal region (e.g., within about the last 2, 3, 4, 5, 6, 7, 8, 9, 10, 20, 30, 40, 50, 60, 70, 80, 90, 100 or so amino acids). Preferably, the intracellular localization or targeting domain is fused to the N-terminus of the DGAT polypeptide, or near the N-terminus, for example, within about the 1-100 amino acids. In particular embodiments, the intracellular localization or targeting domain is fused to the second amino acid of a DGAT polypeptide, resulting in the removal of the first residue (the methionine residue of the AUG codon).

[0107] The intracellular localization domains described herein alter the intracellular localization of the DGAT protein(s) to which they are fused. Such alterations can thus be measured relative to the localization of the corresponding wild-type DGAT protein(s). In the most general aspects, a DGAT fusion protein is “targeted to” or “selectively localizes” to one or more defined intracellular region(s) of a photosynthetic microorganism, where at least about 30%, 40%, 50%, 60%, 70%, 80%, 90%, 95%, 98%, or nearly 100% of the DGAT fusion protein can be found associated with the defined intracellular region(s), relative to a cytoplasmic or a soluble fraction of the microorganism. In particular aspects, the intracellular region is one or more of the plasma membrane, a thylakoid, a vesicle, a lipid body, a glycogen granule, a polyhydroxybutyrate (PHB) body, a carboxysome, a cyanophycin granule, and/or an intracellular membrane, such as an intracellular membrane associated with a thylakoid, vesicle, lipid body, glycogen granule, PHB body, carboxysome, and/or cyanophycin granule. In certain embodiments, the enzymatic domain(s) of the DGAT fusion protein selectively localizes to the cytoplasmic side of the intracellular region(s) or associated membranes.

[0108] In more particular embodiments, a DGAT fusion protein is “targeted to” or “selectively localizes” to one or more membrane(s) of a photosynthetic microorganism, where at least about 30%, 40%, 50%, 60%, 70%, 80%, 90%, 95%, 98%, or nearly 100% of the fusion protein can be found associated with at least one membrane (e.g., a membrane fraction) upon expression in a given photosynthetic microorganism (e.g., Cyanobacteria), relative to other cellular spaces, such as a cytoplasmic or soluble fraction of the cell. Examples of membranes include the plasma membrane and any intracellular membranes, such as intracellular membranes associated with a thylakoid, vesicle, lipid body, glycogen granule, PHB body, carboxysome, and/or cyanophycin granule. In some embodiments, the enzymatic domain(s) of the DGAT fusion protein selectively localize to the cytoplasmic side of the membrane.

[0109] In more specific embodiments, a DGAT fusion protein is “targeted to” or “selectively localizes” to the plasma membrane of a photosynthetic microorganism, where at least about 30%, 40%, 50%, 60%, 70%, 80%, 90%, 95%, 98%, or nearly 100% of the fusion protein can be found at the plasma membrane (or associated with the plasma membrane) upon expression in a given photosynthetic microorganism (e.g., Cyanobacteria), relative to other cellular spaces, such as the cytoplasm, vesicles, lipid bodies, thylakoids, glycogen granules, PHB bodies, carboxysomes, cyanophycin granules, other intracellular membranes (e.g., thylakoid membranes, lipid body membranes, vesicle membranes), or any combination thereof. Thylakoids consist of a thylakoid membrane surrounding a thylakoid lumen, and are the site of photosynthesis. In certain of these and related embodiments, the enzymatic domain(s) of the DGAT fusion protein selectively localize to the cytoplasmic side of the plasma membrane.

[0110] In particular aspects, the fusion to a heterologous intracellular localization domain limits the potential for DGAT-mediated photosystem disruption, generation of reactive oxygen species, and loss of cell viability, and thereby improves the cell growth phenotype of DGAT-expressing and lipid-producing photosynthetic microorganisms.

[0111] Intracellular Localization Domains. Generally, the intracellular localization domain sequences of the DGAT fusion proteins described herein can be obtained from any one or more signal or other sequences that selectively localize a given protein to a defined intracellular region (for instance, relative to dispersal throughout the cytoplasm), such as the plasma membrane, a thylakoid, a vesicle, a lipid body, a glycogen granule, a PHB body, a carboxysome, a cyanophycin granule, or an intracellular membrane. Particular examples thus include membrane-, thylakoid-, vesicle-, lipid body-, glycogen granule-, polyhydroxybutyrate (PHB) body-, carboxysome-, and cyanophycin granule-targeting domains, including domains that target DGAT to the membranes associated with these intracellular regions. In specific instances, the intracellular localization domain selectively localizes the active domain(s) of DGAT to the cytoplasmic side of the intracellular region, so that DGAT can interact with lipid-producing substrates in the cytoplasm.

[0112] The intracellular localization domain can be any length that is sufficient to selectively localize the DGAT fusion protein(s) to an intracellular region of a membrane, such as the plasma membrane, and/or alter its relation to other cell membranes or substrates, and allow the enzymatic portions of the DGAT polypeptide to interact with lipid-producing substrates in the cytoplasm. For instance, in certain embodiments, the intracellular localization domain can be anywhere from about 10-1000 amino acids in length, including about 10, 15, 20, 25, 30, 35, 40, 45, 50, 55, 60, 65, 70, 75, 80, 85, 90, 95, 100, 110, 120, 130, 140, 150, 160, 170, 180, 190, 200, 210, 220, 230, 240, 250, 260, 270, 280, 290, 300, 310, 320, 330, 340, 350, 360, 370, 380, 390, 400, 410, 420, 430, 440, 450, 460, 470, 480, 490, 500, 510, 520, 530, 540, 550, 560, 570, 580, 590, 600, 700, 710, 720, 730, 740, 750, 760, 770, 780, 790, 800, 810, 820, 830, 840, 850, 860, 870, 880, 890, 900, 910, 920, 930, 940, 950, 960, 970, 980, 990, 1000 or more amino acids in length, including all integers and ranges in between (e.g., 20-100, 30-100, 40-100, 50-100, 20-200, 30-200, 40-200, 50-200 amino acids in length).

[0113] In particular embodiments, the intracellular localization domain is a membrane-targeting or plasma membrane (PM)-targeting domain. Such membrane-targeting sequences can be obtained or derived from any combination of N-terminal signal sequence(s), transmembrane domain sequence(s), and/or integral membrane sequence(s) of a bacterial membrane protein, such as a bacterial plasma membrane protein. In certain instances, such bacterial plasma membrane proteins (in their endogenous state) selectively localize to the plasma membrane, and are characterized by having at least one C-terminal region that is localized to the cytoplasmic side of a bacterial plasma membrane, and/or the periplasmic side of the outer membrane (for plasma membrane proteins derived from gram-negative bacteria).

[0114] A bacterial plasma membrane protein “selectively localizes” to the plasma membrane where at least about 30%, 40%, 50%, 60%, 70%, 80%, 90%, 95%, 98%, or nearly 100% of the protein can be found at the plasma membrane upon (preferably endogenous) expression in the bacteria from which it is derived (e.g., gram-positive bacteria, gram-negative bacteria, photosynthetic bacteria, Cyanobacteria), relative to other cellular spaces, such as the cytoplasm, the cell wall, other cellular ‘organelles’ or membranes, such as thylakoid membranes for certain photosynthetic bacteria, or any combination thereof.

[0115] In certain embodiments, the membrane-targeting or PM-targeting domain may comprise an amino acid sequence of an N-terminal signal sequence, an amino acid sequence of one or more transmembrane domains (e.g., 1, 2, 3, 4, 5, 6, 7, 8, 9, 10 or more transmembrane domains), an amino acid sequence of one or more integral membrane domains, or any combination thereof. When combined, the sequences of the N-terminal signal, the transmembrane domain(s), and/or the integral membrane domain(s) can be from the same or different bacterial plasma membrane protein(s).

[0116] Membrane-targeting or PM-targeting domain sequences can be obtained from (or derived from) the signal sequences, transmembrane domains, or integral membrane domains of any variety of bacterial membrane proteins. For instance, the bacterial membrane protein can be an integral membrane protein (IMP), such as a transmembrane protein (TP). In some instances, the membrane-targeting domain is obtained from a single-pass transmembrane protein, having only one domain that spans the lipid bilayer of the plasma membrane, or a multi-pass transmembrane protein, having about 2, 3, 4, 5, 6, 7, 8, 9, 10 or more domains that span the lipid bilayer of the plasma membrane. For the latter, the membrane-targeting domain can comprise any one or more of the multiple transmembrane domains. In certain aspects, the membrane-targeting domain or transmembrane domain (TMD) can comprise an alpha-helical transmembrane structure, or a beta-barrel transmembrane structure, the latter typically deriving from gram-negative outer membrane proteins.

[0117] In some embodiments, the membrane-targeting or PM-targeting domain does not span the entire lipid bilayer, but inserts into or attaches to the cytoplasmic side of the membrane, such as the plasma membrane. Examples include membrane-targeting domains that interact with the membrane by an amphipathic helix (e.g., parallel to the membrane plane), membrane-targeting domains that interact with the membrane by a hydrophobic loop, and membrane-targeting domains that interact with the membrane by electrostatic or ionic interactions, for example, through calcium ions.

[0118] In some embodiments, the membrane-targeting domain sequence is obtained from a membrane protein or plasma membrane protein of one or more gram-negative bacteria, gram-positive bacteria, or other bacteria, such as a Cyanobacteria. Exemplary bacteria are described elsewhere herein and known in the art.

[0119] In particular embodiments the membrane-targeting or PM-targeting domain sequence is obtained from a membrane protein or plasma membrane protein of a photosynthetic bacteria, such as a Cyanobacteria from the genera Aphanocapsa, Aphanothece, Chamaesiphon, Chroococcus, Chroogloeocystis, Coelosphaerium, Crocosphaera, Cyanobacterium, Cyanobium, Cyanodictyon, Cyanosarcina, Cyanothece, Dactylococcopsis, Gloecapsa, Gloeothece, Merismopedia, Microcystis, Radiocystis, Rhabdoderma, Snowella, Synychococcus, Synechocystis, Thermosenechococcus, and Woronichinia; Nostacales Cyanobacteria from the genera Anabaena, Anabaenopsis, Aphanizomenon, Aulosira, Calothrix, Coleodesmium, Cyanospira, Cylindrospermosis, Cylindrospermum, Fremyella, Gleotrichia, Microchaete, Nodularia, Nostoc, Rexia, Richelia, Scytonema, Sprirestis, Toypothrix, Oscillatoriales; Cyanobacteria from the genera Arthrospira, Geitlerinema, Halomicronema, Halospirulina, Katagnymene, Leptolyngbya, Limnothrix, Lyngbya, Microcoleus, Oscillatoria, Phormidium, Planktothricoides, Planktothrix, Plectonema, Pseudoanabaena/Limnothrix, Schizothrix, Spirulina, Symploca, Trichodesmium, Tychonema; Pleurocapsales cyanobacterium from the genera Chroococcidiopsis, Dermocarpa, Dermocarpella, Myxosarcina, Pleurocapsa, Stanieria, Xenococcus, Prochlorophytes; Cyanobacterium from the genera Prochloron, Prochlorococcus, Prochlorothrix; and Stigonematales cyanobacterium from the genera Capsosira, Chlorogeoepsis, Fischerella, Hapalosiphon, Mastigocladopsis, Nostochopsis, Stigonema, Symphyonema, Symphonemopsis, Umezakia, and Westiellopsis. In certain embodiments, the Cyanobacterium is from the genus Synechococcus, including, but not limited to Synechococcus bigranulatus, Synechococcus elongatus, Synechococcus leopoliensis, Synechococcus lividus, Synechococcus nidulans, and Synechococcus rubescens. In specific embodiments, the membrane-targeting domain sequence is derived from a plasma membrane protein from S. elongatus sp. strain PCC7942 or Synechococcus sp. PCC 7002 (originally known as Agmenellum quadruplicatum).

[0120] In some embodiments, the membrane protein is a plasma membrane receptor protein, such as a chemoreceptor or chemotaxis protein. Particular examples include integral membrane chemoreceptors, e.g., transmembrane chemoreceptors. Examples of chemoreceptors or chemotaxis proteins include methyl-accepting chemotaxis proteins and amino acid chemotaxis receptors, such as serine chemotaxis receptors (e.g., Tsr receptor from Escherichia coli) and aspartate chemotaxis receptors. The membrane-targeting domain can thus be obtained from the signal sequence and/or transmembrane domains of any one or more of such bacterial plasma membrane receptors.

[0121] In particular embodiments, the membrane-targeting domain is obtained from (or derived from) a methyl-accepting chemotaxis protein (MCP). MCPs can be classified by topology type (see Zhulin, Adv Microb Physiol. 45:157-198, 2001) and signaling domain class (see Alexander and Zhulin, PNAS USA. 104:2885-2890, 2007). Topology type I MCPs have large periplasmic ligand-binding domains and an elongated cytoplasmic region consisting of a HAMP domain (i.e., histidine kinases, adenylyl cyclases, methyl-binding proteins, and phosphatases) followed by a signaling domain, which in turn is composed of “methylation,” “flexible bundle,” and “signaling” sub-domains (see Alexander and Zhulin, supra; and Hazelbauer et al., Trends Biochem Sci. 33:9-19, 2008). MCPs cluster together with other chemotaxis proteins in large arrays at the cell pole.

[0122] MCP arrays from variety of bacteria have been well-characterized, including, for example, E. coli, C. crescentus, Thermotoga maritima, Magnetospirillum magneticum, Rhodobacter sphaeroides, Treponema primitia, Listeria monocytogenes, Helicobacter hepaticus, Campylobacter jejuni, Acetonema longum, Borrelia burgdorferi, Halothiobacillus neapolitanus, and Campylobacter jejuni (see Briegel et al., PNAS USA. 106:17181-17186, 2009). The membrane-targeting domain can thus be derived from the signal sequence and/or transmembrane domains of an MCP from any one or more of these bacteria, or an MCP from any other bacteria described herein or known in the art.

[0123] In specific embodiments, the MCP is encoded by PCC7942-0858 or PCC7942-1015 from S. elongatus. The polypeptide and polynucleotide sequence of the S. elongatus PCC7942-0858 MCP are set forth in SEQ ID NOS:199 and 200, respectively, and the polypeptide and polynucleotide sequence of the S. elongatus PCC7942-1015 MCP are set forth in SEQ ID NOS:201 and 202, respectively.

[0124] In some embodiments, the membrane-targeting domain comprises or consists essentially of the N-terminal signal sequence, the first (N-terminal) transmembrane domain, and/or the second transmembrane domain of PCC7942-0858, singly or in combination together. In certain instances, the bacterial membrane-targeting domain comprises or consists essentially of about the N-terminal 43-53 amino acids of the MCP encoded by PCC7942-0858, for example, about residues 1-43, 1-44, 1-45, 1-46, 1-47, 1-48, 1-49, 1-50, 1-51, 1-52, 1-53, 1-54, 1-55, 1-56, 1-57, 1-58, 1-59, 1-60 of SEQ ID NO:199. In specific instances, the bacterial membrane-targeting domain comprises or consists essentially of SEQ ID NOs 211-215. In specific instances, the bacterial membrane-targeting domain comprises or consists essentially of the N-terminal signal sequence and the two N-terminally proximal TMDs of the MCP encoded by PCC7942-0858, for example, about residues 1-141 of SEQ ID NO:199.

[0125] DGAT Polypeptides. As used herein, a “diacylglycerol acyltransferase” (DGAT) polypeptide includes any protein, polypeptide or peptide, obtainable from any cell source, which demonstrates the ability to catalyze the production of triacylglycerol from 1,2-diacylglycerol and fatty acyl substrates under enzyme reactive conditions, in addition to any naturally-occurring (e.g., allelic variants, orthologs) or non-naturally occurring variants of a diacylglycerol acyltransferase sequence having such ability. DGAT polypeptides of the present invention also include bi-functional proteins, such as those bi-functional proteins that exhibit a DGAT activity as well as a CoA:fatty alcohol acyltransferase activity, e.g., a wax ester synthesis (WES) activity, as often found in many TAG producing bacteria.

[0126] Diacylglycerol acyltransferases (DGATs) are members of the O-acyltransferase superfamily, which esterify either sterols or diacyglycerols in an oleoyl-CoA-dependent manner. DGAT in particular esterifies diacylglycerols, which reaction represents the final enzymatic step in the production of triacylglycerols in plants, fungi and mammals. Specifically, DGAT is responsible for transferring an acyl group from acyl-coenzyme-A to the sn-3 position of 1,2-diacylglycerol (DAG) to form triacylglycerol (TAG). DGAT is an integral membrane protein that has been generally described in Harwood (Biochem. Biophysics. Acta, 1301:7-56, 1996), Daum et al. (Yeast 16:1471-1510, 1998), and Coleman et al. (Annu. Rev. Nutr. 20:77-103, 2000) (each of which are herein incorporated by reference).

[0127] In plants and fungi, DGAT is associated with the membrane and lipid body fractions. In catalyzing TAGs, DGAT contributes mainly to the storage of carbon used as energy reserves. In animals, however, the role of DGAT is more complex. DGAT not only plays a role in lipoprotein assembly and the regulation of plasma triacylglycerol concentration (Bell, R. M., et al.), but participates as well in the regulation of diacylglycerol levels (see Brindley, Biochemistry of Lipids, Lipoproteins and Membranes, eds. Vance, D. E. & Vance, J. E. (Elsevier, Amsterdam), 171-203; and Nishizuka, Science 258:607-614, 1992, each of which are incorporated by reference).

[0128] In eukaryotes, at least three independent DGAT gene families (DGAT1, DGAT2, and PDAT) have been described that encode proteins with the capacity to form TAG. Yeast contain all three of DGAT1, DGAT2, and PDAT, but the expression levels of these gene families varies during different phases of the life cycle (Dahlqvst, A., et al. Proc. Natl. Acad. Sci. USA 97:6487-6492, 2000, incorporated by reference).

[0129] In prokaryotes, WS/DGAT from Acinetobacter calcoaceticus ADP1 represents the first identified member of a widespread class of bacterial wax ester and TAG biosynthesis enzymes. This enzyme comprises a putative membrane-spanning region but shows no sequence homology to the DGAT1 and DGAT2 families from eukaryotes. Under in vitro conditions, WS/DGAT shows a broad capability of utilizing a large variety of fatty alcohols, and even thiols as acceptors of the acyl moieties of various acyl-CoA thioesters. WS/DGAT acyltransferase enzymes exhibit extraordinarily broad substrate specificity. Genes for homologous acyltransferases have been found in almost all bacteria capable of accumulating neutral lipids, including, for example, Acinetobacter baylii, A. baumanii, and M. avium, and M. tuberculosis CDC1551, in which about 15 functional homologues are present (see, e.g., Daniel et al., J. Bacteriol. 186:5017-5030, 2004; and Kalscheuer et al., J. Biol. Chem. 287:8075-8082, 2003).

[0130] DGAT proteins may utilize a variety of acyl substrates in a host cell, including fatty acyl-CoA and fatty acyl-ACP molecules. In addition, the acyl substrates acted upon by DGAT enzymes may have varying carbon chain lengths and degrees of saturation, although DGAT may demonstrate preferential activity towards certain molecules.

[0131] Like other members of the eukaryotic O-acyltransferase superfamily, eukaryotic DGAT polypeptides typically contain a FYxDWWN (SEQ ID NO:15) heptapeptide retention motif, as well as a histidine (or tyrosine)-serine-phenylalanine (H/YSF) tripeptide motif, as described in Zhongmin et al. (Journal of Lipid Research, 42:1282-1291, 2001) (herein incorporated by reference). The highly conserved FYxDWWN (SEQ ID NO:15) is believed to be involved in fatty Acyl-CoA binding. In certain instances, the DGAT polypeptide portion of the fusion proteins described herein may thus comprise one or more these motifs.

[0132] DGAT polypeptides utilized according to the fusion proteins described herein may be isolated from any organism, including eukaryotic and prokaryotic organisms. Eukaryotic organisms having a DGAT gene are well-known in the art, and include various animals (e.g., mammals, fruit flies, nematodes), plants, parasites, and fungi (e.g., yeast such as S. cerevisiae and Schizosaccharomyces pombe). Examples of prokaryotic organisms include certain actinomycetes, a group of Gram-positive bacteria with high G+C ratio, such as those from the representative genera Actinomyces, Arthrobacter, Corynebacterium, Frankia, Micrococcus, Mocrimonospora, Mycobacterium, Nocardia, Propionibacterium, Rhodococcus and Streptomyces. Particular examples of actinomycetes that have one or more genes encoding a DGAT activity include, for example, Mycobacterium tuberculosis, M. avium, M. smegmatis, Micromonospora echinospora, Rhodococcus opacus, R. ruber, and Streptomyces lividans.

[0133] Additional examples of prokaryotic organisms that encode one or more enzymes having a DGAT activity include members of the genera Acinetobacter, such as A. calcoaceticus, A. baumanii, A. baylii, and members of the generua Alcanivorax. In certain embodiments, a DGAT polypeptide is from Acinetobacter baylii sp. ADP1, a gram-negative triglyceride forming prokaryote, which contains a well-characterized DGAT (AtfA).

[0134] In particular embodiments, the DGAT polypeptide is an Acinetobacter DGAT (ADGAT), a Streptomyces DGAT, or an Alcanivorax DGAT. In specific embodiments, the DGAT polypeptide comprises or consists of a polypeptide sequence set forth in any one of SEQ ID NOs:58, 59, 60, or 61, or a fragment or variant thereof. SEQ ID NO:58 is the sequence of DGATn; SEQ ID NO:59 is the sequence of Streptomyces coelicolor DGAT (ScoDGAT or SDGAT); SEQ ID NO:60 is the sequence of Alcanivorax borkumensis DGAT (AboDGAT); and SEQ ID NO:61 is the sequence of DGATd.

[0135] In certain embodiments, the modified photosynthetic microorganisms of the present invention may express two or more intracellular localization domain-DGAT fusion proteins. The DGAT polypeptides may by the same or different. In particular embodiments, the following intracellular localization domain-DGAT fusions are co-expressed in modified photosynthetic microorganisms, e.g., Cyanobacteria, using one of the following double DGAT strains: ADGATd:: ScoDGAT; ADGATd(NS1)::ADGATd(NS2); ADGATn(NS1)::ADGATn(NS2); ADGATn(NS1)::SDGAT(NS2); SDGAT(NS1)::ADGATn(NS2); SDGAT(NS1)::SDGAT(NS2). For the NS1 vector, pAM2291, EcoRI follows ATG and is part of the open reading frame (ORF). For the NS2 vector, pAM1579, EcoRI follows ATG and is part of the ORF. A DGAT having EcoRI nucleotides following ATG may be cloned in either pAM2291 or pAM1579; such a DGAT is referred to as ADGATd. Other embodiments utilize the vector, pAM2314FTrc3, which is an NS1 vector with Nde/BglII sites, or the vector, pAM1579FTrc3, which is the NS2 vector with Nde/BglII sites. A DGAT without EcoRI nucleotides may be cloned into either of these last two vectors. Such a DGAT is referred to as ADGATn. Modified photosynthetic microorganisms expressing different DGATs express TAGs having different fatty acid compositions. Accordingly, certain embodiments contemplate expressing two or more different intracellular localization domain-DGAT fusions, in order to produce TAGs having varied fatty acid compositions.

[0136] Peptide Linkers. In certain embodiments, a peptide linker sequence may be employed to separate the DGAT polypeptide(s) and the heterologous intracellular localization domain(s) by a distance sufficient to ensure that each polypeptide folds into its desired secondary and tertiary structures. Such a peptide linker sequence can be incorporated into the fusion protein using standard techniques well known in the art.

[0137] Certain peptide linker sequences may be chosen based on the following exemplary factors: (1) their ability to adopt a flexible extended conformation; (2) their inability to adopt a secondary structure that could interact with functional epitopes on the first and second polypeptides; (3) their physiological stability; and (4) the lack of hydrophobic or charged residues that might react with the polypeptide functional epitopes, or other features. See, e.g., George and Heringa, J Protein Eng. 15:871-879, 2002.

[0138] The linker sequence can be essentially any length, but is generally from about 1 to about 300 amino acids in length. Particular linkers can have an overall amino acid length of about 1-300 amino acids, 1-250, 1-200 amino acids, 1-150 amino acids, 1-100 amino acids, 1-90 amino acids, 1-80 amino acids, 1-70 amino acids, 1-60 amino acids, 1-50 amino acids, 1-40 amino acids, 1-30 amino acids, 1-20 amino acids, 1-10 amino acids, 1-5 amino acids, 1-4 amino acids, 1-3 amino acids, or about 1, 2, 3, 4, 5, 6, 7, 8, 9, 10, 11, 12, 13, 14, 15, 16, 17, 18, 19, 20, 21, 22, 23, 24, 25, 26, 27, 28, 29, 30, 31, 32, 33, 34, 35, 36, 37, 38, 39, 40, 41, 42, 43, 44, 45, 46, 47, 48, 49, 50, 60, 70, 80, 90, 100, 110, 120, 130, 140, 150, 160, 170, 180, 190, 200, 210, 220, 230, 240, 250, 260, 270, 280, 290, 300 or more amino acids in length.

[0139] Certain amino acid sequences which may be usefully employed as linkers include those disclosed in Maratea et al., Gene 40:39-46, 1985; Murphy et al., PNAS USA. 83:8258-8262, 1986; U.S. Pat. No. 4,935,233 and U.S. Pat. No. 4,751,180. Particular peptide linker sequences contain Gly, Ser, and/or Asn residues. Other near neutral amino acids, such as Thr and Ala may also be employed in the peptide linker sequence, if desired.

[0140] Certain exemplary linkers include Gly, Ser and/or Asn-containing linkers, as follows: [G]ₓ, [S]ₓ, [N]ₓ, [GS]ₓ, [GGS]ₓ, [GSS]ₓ, [GSGS]ₓ (SEQ ID NO:203), [GGSG]ₓ (SEQ ID NO:204), [GGGS]ₓ (SEQ ID NO:205), [GGGGS]ₓ (SEQ ID NO:206), [GN]ₓ, [GGN]ₓ, [GNN]ₓ, [GNGN]ₓ (SEQ ID NO:207), [GGNG]ₓ (SEQ ID NO:208), [GGGN]ₓ (SEQ ID NO:209), [GGGGN]ₓ (SEQ ID NO:209) linkers, where ₓ is 1, 2, 3, 4, 5, 6, 7, 8, 9, 10, 11, 12, 13, 14, 15, 16, 17, 18, 19, 20, 25, 30, 40, 50 or more. Other combinations of these and related amino acids will be apparent to persons skilled in the art.

[0141] In certain embodiments, however, any one or more of the peptide linkers are optional. For instance, linker sequences may not required when the bacterial membrane protein (from which the membrane- or PM-targeting domain is derived) and the DGAT polypeptides have non-essential regions (e.g., N-terminal and/or C-terminal amino acids, or for the plasma membrane proteins, regions just downstream of the signal sequences and/or transmembrane domains) that can be used to separate the functional domains and prevent steric interference.

[0142] (ii) Lipid Biosynthesis Proteins

[0143] In various embodiments, modified photosynthetic microorganisms of the present invention further comprise one or more exogenous (e.g., introduced) or overexpressed nucleic acids that encode a lipid biosynthesis protein, e.g., a polypeptide having an activity associated with triglyceride biosynthesis or fatty acid biosynthesis, including but not limited to any of those described herein. In particular instances, a modified photosynthetic microorganism may comprise reduced expression and/or activity of one or more selected lipid biosynthesis proteins. Certain of these proteins are described in greater detail below.

[0144] In particular embodiments, the exogenous nucleic acid does not comprise a nucleic acid sequence that is native to the microorganism's genome. In some embodiments, the exogenous nucleic acid comprises a nucleic acid sequence that is native to the microorganism's genome, but it has been introduced into the microorganism, e.g., in a vector or by molecular biology techniques, for example, to increase expression of the nucleic acid and/or its encoded polypeptide in the microorganism. In certain embodiments, the expression of a native or endogenous nucleic acid and its corresponding protein can be increased by introducing a heterologous promoter upstream of the native gene. As noted above, lipid biosynthesis proteins can be involved in triglyceride biosynthesis, fatty acid synthesis, wax ester synthesis, or any combination thereof.

[0145] Triglyceride Biosynthesis. Triglycerides, or triacylglycerols (TAGs), consist primarily of glycerol esterified with three fatty acids, and yield more energy upon oxidation than either carbohydrates or proteins. Triglycerides provide an important mechanism of energy storage for most eukaryotic organisms. In mammals, TAGs are synthesized and stored in several cell types, including adipocytes and hepatocytes (Bell et al. Annu. Rev. Biochem. 49:459-487, 1980) (incorporated by reference). In plants, TAG production is mainly important for the generation of seed oils.

[0146] In contrast to eukaryotes, the observation of triglyceride production in prokaryotes has been limited to certain actinomycetes, such as members of the genera Mycobacterium, Nocardia, Rhodococcus and Streptomyces, in addition to certain members of the genus Acinetobacter. In certain Actinomycetes species, triglycerides may accumulate to nearly 80% of the dry cell weight, but accumulate to only about 15% of the dry cell weight in Acinetobacter. In general, triglycerides are stored in spherical lipid bodies, with quantities and diameters depending on the respective species, growth stage, and cultivation conditions. For example, cells of Rhodococcus opacus and Streptomyces lividans contain only few TAGs when cultivated in complex media with a high content of carbon and nitrogen; however, the lipid content and the number of TAG bodies increase drastically when the cells are cultivated in mineral salt medium with a low nitrogen-to-carbon ratio, yielding a maximum in the late stationary growth phase. At this stage, cells can be almost completely filled with lipid bodies exhibiting diameters ranging from 50 to 400 nm. One example is R. opacus PD630, in which lipids can reach more than 70% of the total cellular dry weight.

[0147] In bacteria, TAG formation typically starts with the docking of a diacylglycerol acyltransferase enzyme to the plasma membrane, followed by formation of small lipid droplets (SLDs). These SLDs are only some nanometers in diameter and remain associated with the membrane-docked enzyme. In this phase of lipid accumulation, SLDs typically form an emulsive, oleogenous layer at the plasma membrane. During prolonged lipid synthesis, SLDs leave the membrane-associated acyltransferase and conglomerate to membrane-bound lipid prebodies. These lipid prebodies reach distinct sizes, e.g., about 200 nm in A. calcoaceticus and about 300 nm in R. opacus, before they lose contact with the membrane and are released into the cytoplasm. Free and membrane-bound lipid prebodies correspond to the lipid domains occurring in the cytoplasm and at the cell wall, as observed in M. smegmatis during fluorescence microscopy and also confirmed in R. opacus PD630 and A. calcoaceticus ADP1 (see, e.g., Christensen et al., Mol. Microbiol. 31:1561-1572, 1999; and Wältermann et al., Mol. Microbiol. 55:750-763, 2005). Inside the lipid prebodies, SLDs coalesce with each other to form the homogenous lipid core found in mature lipid bodies, which often appear opaque in electron microscopy.

[0148] The compositions and structures of bacterial TAGs vary considerably depending on the microorganism and on the carbon source. In addition, unusual acyl moieties, such as phenyldecanoic acid and 4, 8, 12 trimethyl tridecanoic acid, may also contribute to the structural diversity of bacterial TAGs (see, e.g., Alvarez et al., Appl Microbiol Biotechnol. 60:367-76, 2002).

[0149] As with eukaryotes, the main function of TAGs in prokaryotes is to serve as a storage compound for energy and carbon. TAGs, however, may provide other functions in prokaryotes. For example, lipid bodies may act as a deposit for toxic or useless fatty acids formed during growth on recalcitrant carbon sources, which must be excluded from the plasma membrane and phospholipid (PL) biosynthesis. Furthermore, many TAG-accumulating bacteria are ubiquitous in soil, and in this habitat, water deficiency causing dehydration is a frequent environmental stress. Storage of evaporation-resistant lipids might be a strategy to maintain a basic water supply, since oxidation of the hydrocarbon chains of the lipids under conditions of dehydration would generate considerable amounts of water. Cyanobacteria such as Synechococcus, however, do not produce triglycerides, because these organisms lack the enzymes necessary for triglyceride biosynthesis.

[0150] Triglycerides are synthesized from fatty acids and glycerol. As one mechanism of triglyceride (TAG) synthesis, sequential acylation of glycerol-3-phosphate via the “Kennedy Pathway” leads to the formation of phosphatidate. Phosphatidate is then dephosphorylated by the enzyme phosphatidate phosphatase to yield 1,2diacylglycerol (DAG). Using DAG as a substrate, at least three different classes of enzymes are capable of mediating TAG formation. As one example, an enzyme having diacylglycerol acyltransferase (DGAT) activity catalyzes the acylation of DAG using acyl-CoA as a substrate. Essentially, DGAT enzymes combine acyl-CoA with 1,2diacylglycerol molecule to form a TAG. As an alternative, Acyl-CoA-independent TAG synthesis may be mediated by a phospholipid:DAG acyltransferase found in yeast and plants, which uses phospholipids as acyl donors for DAG esterification. Third, TAG synthesis in animals and plants may be mediated by a DAG-DAG-transacylase, which uses DAG as both an acyl donor and acceptor, yielding TAG and monoacylglycerol.

[0151] Modified photosynthetic microorganisms, e.g., Cyanobacteria, of the present invention may comprise one or more exogenous polynucleotides encoding polypeptides comprising one or more of the polypeptides and enzymes described herein.

[0152] Since wild type Cyanobacteria do not typically encode the enzymes necessary for triglyceride synthesis, such as the enzymes having diacylglycerol acyltransferase activity, embodiments of the present invention include genetically modified Cyanobacteria that comprise polynucleotides encoding one or more DGAT fusion proteins, optionally in combination with one or more enzymes having a fatty acyl-CoA synthetase activity. In particular embodiments, the one or more exogenous polynucleotides encode a DGAT fusion protein described herein and a fatty acyl-CoA synthetase, or a functional variant or fragment thereof.

[0153] Moreover, since triglycerides are typically formed from fatty acids, the level of fatty acid biosynthesis in a cell may limit the production of triglycerides. Increasing the level of fatty acid biosynthesis may, therefore, allow increased production of triglycerides. As discussed below, acetyl-CoA carboxylase catalyzes the commitment step to fatty acid biosynthesis. Thus, certain embodiments of the present invention include Cyanobacterium, and methods of use thereof, comprising polynucleotides that encode one or more enzymes having acetyl-CoA carboxylase activity to increase fatty acid biosynthesis and lipid production, in addition to one or more DGAT fusion proteins and optionally one or more enzymes having fatty acyl-CoA synthetase activity, to catalyze triglyceride production. These and related embodiments are detailed below.

[0154] Fatty Acid Biosynthesis. Fatty acids are a group of negatively charged, linear hydrocarbon chains of various length and various degrees of oxidation states. The negative charge is located at a carboxyl end group and is typically deprotonated at physiological pH values (pK˜2-3). The length of the fatty acid ‘tail’ determines its water solubility (or rather insolubility) and amphipathic characteristics. Fatty acids are components of phospholipids and sphingolipids, which form part of biological membranes, as well as triglycerides, which are primarily used as energy storage molecules inside cells.

[0155] Fatty acids are formed from acetyl-CoA and malonyl-CoA precursors. Malonyl-CoA is a carboxylated form of acetyl-CoA, and contains a 3-carbon dicarboxylic acid, malonate, bound to Coenzyme A. Acetyl-CoA carboxylase catalyzes the 2-step reaction by which acetyl-CoA is carboxylated to form malonyl-CoA. In particular, malonate is formed from acetyl-CoA by the addition of CO₂ using the biotin cofactor of the enzyme acetyl-CoA carboxylase.

[0156] Fatty acid synthase (FAS) carries out the chain elongation steps of fatty acid biosynthesis. FAS is a large multienzyme complex. In mammals, FAS contains two subunits, each containing multiple enzyme activities. In bacteria and plants, individual proteins, which associate into a large complex, catalyze the individual steps of the synthesis scheme. For example, in bacteria and plants, the acyl carrier protein is a smaller, independent protein.

[0157] Fatty acid synthesis starts with acetyl-CoA, and the chain grows from the “tail end” so that carbon 1 and the alpha-carbon of the complete fatty acid are added last. The first reaction is the transfer of an acetyl group to a pantothenate group of acyl carrier protein (ACP), a region of the large mammalian fatty acid synthase (FAS) protein. In this reaction, acetyl CoA is added to a cysteine —SH group of the condensing enzyme (CE) domain: acetyl CoA+CE-cys-SH->acetyl-cys-CE+CoASH. Mechanistically, this is a two step process, in which the group is first transferred to the ACP (acyl carrier peptide), and then to the cysteine —SH group of the condensing enzyme domain.

[0158] In the second reaction, malonyl CoA is added to the ACP sulfhydryl group: malonyl CoA+ACP-SH->malonyl ACP+CoASH. This —SH group is part of a phosphopantethenic acid prosthetic group of the ACP.

[0159] In the third reaction, the acetyl group is transferred to the malonyl group with the release of carbon dioxide: malonyl ACP+acetyl-cys-CE->beta-ketobutyryl-ACP+CO₂.

[0160] In the fourth reaction, the keto group is reduced to a hydroxyl group by the beta-ketoacyl reductase activity: beta-ketobutyryl-ACP+NADPH+H⁺->beta-hydroxybutyryl-ACP+NAD⁺.

[0161] In the fifth reaction, the beta-hydroxybutyryl-ACP is dehydrated to form a trans-monounsaturated fatty acyl group by the beta-hydroxyacyl dehydratase activity: beta-hydroxybutyryl-ACP->2-butenoyl-ACP+H₂O.

[0162] In the sixth reaction, the double bond is reduced by NADPH, yielding a saturated fatty acyl group two carbons longer than the initial one (an acetyl group was converted to a butyryl group in this case): 2-butenoyl-ACP+NADPH+H⁺->butyryl-ACP+NADP⁺. The butyryl group is then transferred from the ACP sulfhydryl group to the CE sulfhydryl: butyryl-ACP+CE-cys-SH->ACP-SH+butyryl-cys-CE. This step is catalyzed by the same transferase activity utilized previously for the original acetyl group. The butyryl group is now ready to condense with a new malonyl group (third reaction above) to repeat the process. When the fatty acyl group becomes 16 carbons long, a thioesterase activity hydrolyses it, forming free palmitate: palmitoyl-ACP+H₂O->palmitate+ACP-SH. Fatty acid molecules can undergo further modification, such as elongation and/or desaturation.

[0163] Modified photosynthetic microorganisms, e.g., Cyanobacteria, may comprise one or more exogenous polynucleotides encoding any of the above polypeptides or enzymes involved in fatty acid synthesis. In particular embodiments, the enzyme is an acetyl-CoA carboxylase or a variant or functional fragment thereof.

[0164] Wax Ester Synthesis. Wax esters are esters of a fatty acid and a long-chain alcohol. These neutral lipids are composed of aliphatic alcohols and acids, with both moieties usually long-chain (e.g., C₁₆ and C₁₈) or very-long-chain (C₂₀ and longer) carbon structures, though medium-chain-containing wax esters are included (e.g., C₁₀, C₁₂ and C₁₄). Wax esters have diverse biological functions in bacteria, insects, mammals, and terrestrial plants and are also important substrates for a variety of industrial applications. Various types of wax ester are widely used in the manufacture of fine chemicals such as cosmetics, candles, printing inks, lubricants, coating stuffs, and others.

[0165] In certain organisms, such as Acinetobacter, the pathway for wax ester synthesis of Acinetobacter spp. has been assumed to start from acyl coenzyme A (acyl-CoA), which is then reduced to the corresponding alcohol via acyl-CoA reductase and aldehyde reductase. In other organisms, for example, wax ester biosynthesis involves elongation of saturated C₁₆ and C₁₈ fatty acyl-CoAs to very-long-chain fatty acid wax precursors between 24 and 34 carbons in length, and their subsequent modification by either the alkane-forming (decarbonylation) or the alcohol-forming (acyl reduction) pathway (see Li et al., Plant Physiology 148:97-107, 2008).

[0166] In certain aspects, wax ester synthesis can occur via the acyl-ACP=>acyl aldehyde pathway. In this pathway, acyl-ACP reductase overexpression increases conversion of acyl-ACP into acyl aldehydes, alcohol dehydrogenase overexpression then increases conversion of acyl aldehydes into fatty alcohols, and DGAT overexpression cooperatively increases conversion of the fatty alcohols into their corresponding wax esters. Modified photosynthetic microorganisms, e.g., Cyanobacteria, may therefore comprise one or more exogenous polynucleotides encoding any of the above polypeptides or enzymes involved in wax ester synthesis.

[0167] Acyl Carrier Proteins. Embodiments of the present invention optionally include one or more exogenous (e.g., recombinantly introduced) or overexpressed ACP proteins. These proteins play crucial roles in fatty acid synthesis. Fatty acid synthesis in bacteria, including Cyanobacteria, is carried out by highly conserved enzymes of the type II fatty acid synthase system (FAS II; consisting of about 19 genes) in a sequential, regulated manner. Acyl carrier protein (ACP) plays a central role in this process by carrying all the intermediates as thioesters attached to the terminus of its 4′-phosphopantetheine prosthetic group (ACP-thioesters). Apo-ACP, the product of acp gene, is typically activated by a phosphopantetheinyl transferease (PPT) such as the acyl carrier protein synthase (AcpS) type found in E. coli or the Sfp (surfactin type) PTT as characterized in Bacillus subtilis. Cyanobacteria posses an Sfp-like PPT, which is understood to act in both primary and secondary metabolism. Embodiments of the present invention therefore include overexpression of PPTs such as AcpS and/or Sfp-type PPTs in combination with overexpression of cognate ACP encoding genes, such as ACP.

[0168] The ACP-thioesters are substrates for all of the enzymes of the FAS II system. The end product of fatty acid synthesis is a long acyl chain typically consisting of about 14-18 carbons attached to ACP by a thioester bond.

[0169] At least three enzymes of the FAS II system in other bacteria can be subject to feedback inhibition by acyl-ACPs: 1) the ACCase complex—a heterotetramer of the AccABCD genes that catalyzes the production of malonyl-coA, the first step in the pathway; 2) the product of the FabH gene (β-ketoacyl-ACP synthase III), which catalyzes the condensation of acetyl-CoA with malonyl-ACP; and 3) the product of the FabI gene (enoyl-ACP reductase), which catalyzes the final elongation step in each round of elongation. Certain proteins such as acyl-ACP reductase are capable of increasing fatty acid production in photosynthetic bacteria such as Cyanobacteria, and it is believed that overexpression of ACP in combination with this protein and possibly other biosynthesis proteins will further increases fatty acid production in such strains.

[0170] An ACP can be derived from a variety of eukaryotic organisms, microorganisms (e.g., bacteria, fungi), or plants. In certain embodiments, an ACP polynucleotide sequence and its corresponding polypeptide sequence are derived from Cyanobacteria such as Synechococcus. In certain embodiments, ACPs can be derived from plants such as spinach. SEQ ID NOS:5-12 provide the nucleotide and polypeptide sequences of exemplary bacterial ACPs from Synechococcus and Acinetobacter, and SEQ ID NOS:13-14 provide the same for an exemplary plant ACP from Spinacia oleracea (spinach). SEQ ID NOS:5 and 6 derive from Synechococcus elongatus PCC7942, and SEQ ID NOS:7-12 derive from Acinetobacter sp. ADP1.

[0171] Examples of prokaryotic organisms having an ACP include certain actinomycetes, a group of Gram-positive bacteria with high G+C ratio, such as those from the representative genera Actinomyces, Arthrobacter, Corynebacterium, Frankia, Micrococcus, Mocrimonospora, Mycobacterium, Nocardia, Propionibacterium, Rhodococcus and Streptomyces. Particular examples of actinomycetes that have one or more genes encoding an ACP activity include, for example, Mycobacterium tuberculosis, M. avium, M. smegmatis, Micromonospora echinospora, Rhodococcus opacus, R. ruber, and Streptomyces lividans. Additional examples of prokaryotic organisms that encode one or more enzymes having an ACP activity include members of the genera Acinetobacter, such as A. calcoaceticus, A. baumanii, A. baylii, and members of the generua Alcanivorax. In certain embodiments, an ACP gene or enzyme is isolated from Acinetobacter baylii sp. ADP1, a gram-negative triglyceride forming prokaryote.

[0172] Acyl ACP Synthases (Aas). Acyl-ACP synthetases (Aas) catalyze the ATP-dependent acylation of the thiol of acyl carrier protein (ACP) with fatty acids, including those fatty acids having chain lengths from about C4 to C18. In Cyanobacteria, among other functions, Aas enzymes not only directly incorporate exogenous fatty acids from the culture medium into other lipids, but also play a role in the recycling of acyl chains from lipid membranes. Deletion of Aas in cyanobacteria can lead to secretion of free fatty acids into the culture medium. See, e.g., Kaczmarzyk and Fulda, Plant Physiology 152:1598-1610, 2010.

[0173] Certain embodiments may overexpress one or more Aas polypeptides described herein and known in the art. According to one non-limiting theory, overexpression of Aas in combination with overexpression of ACP leads to increased TAG production in DGAT-expressing strains, for example, by boosting acyl-ACP levels. Overexpression of Aas in optional combination with overexpression of ACP may likewise increase wax ester formation, for example, when combined with overexpression of one or more alcohol dehydrogenase(s) and wax ester synthase(s), such as a bi-functional DGAT. Certain embodiments therefore include modified photosynthetic microorganisms comprising overexpressed Aas polypeptide(s), optionally in combination with overexpressed ACP polypeptide(s), especially when combined with overexpression of alcohol dehydrogenase, acyl-ACP reductase (e.g., orf1594), and wax ester synthase (e.g., aDGAT).

[0174] Examples of bacterial Aas enzymes include those derived from E. coli, Acinetobacter, and Vibrio sp. such as V. harveyi (see, e.g., Shanklin, Protein Expression and Purification. 18:355-360, 2000; Jiang et al., Biochemistry. 45:10008-10019, 2006). SEQ ID NOS:43 and 44, respectively, provide the nucleotide and polypeptide sequences of an exemplary Aas from Synechococcus elongatus PCC 7942 (0918).

[0175] In specific embodiments, the Aas is derived from the same organism as the overexpressed ACP, DGAT, and/or the TES, if any one of these polypeptides is employed in combination with an Aas. Accordingly, certain embodiments include Aas sequences from any of the organisms described herein for deriving a DGAT or TES, including, for example, various animals (e.g., mammals, fruit flies, nematodes), plants, parasites, and fungi (e.g., yeast such as S. cerevisiae and Schizosaccharomyces pombe). Examples of prokaryotic organisms include certain actinomycetes, a group of Gram-positive bacteria with high G+C ratio, such as those from the representative genera Actinomyces, Arthrobacter, Corynebacterium, Frankia, Micrococcus, Mocrimonospora, Mycobacterium, Nocardia, Propionibacterium, Rhodococcus and Streptomyces. Particular examples of actinomycetes that have one or more genes encoding an Aas activity include, for example, Mycobacterium tuberculosis, M. avium, M. smegmatis, Micromonospora echinospora, Rhodococcus opacus, R. ruber, and Streptomyces lividans. Additional examples of prokaryotic organisms that encode one or more enzymes having an Aas activity include members of the genera Acinetobacter, such as A. calcoaceticus, A. baumanii, A. baylii, and members of the generua Alcanivorax. In certain embodiments, an Aas gene or enzyme is isolated from Acinetobacter baylii sp. ADP1, a gram-negative triglyceride forming prokaryote.

[0176] According to one non-limiting theory, an endogenous aldehyde dehydrogenase may be acting on the excess acyl-aldehydes generated by overexpressed orf1594 and converting them to free fatty acids. The normal role of such a dehydrogenase might involve removing or otherwise dealing with damaged lipids. In this scenario, it is then likely that the Aas gene product recycles these free fatty acids by ligating them to ACP. Accordingly, reducing or eliminating expression of the Aas gene product might ultimately increase production of fatty acids, by reducing or preventing their transfer to ACP. Hence, certain aspects include mutations (e.g., genomic) such as point mutations or insertions that reduce or eliminate the enzymatic activity of one or more endogenous acyl-ACP synthetases (or synthases). Also included are full or partial deletions of an endogenous gene encoding an Aas protein.

[0177] Acyl-ACP Reductases. Acyl-ACP reductases (or acyl-ACP dehydrogenases) are members of the reductase or short-chain dehydrogenase family, and are key enzymes of the type II fatty acid synthesis (FAS) system. Among other potential catalytic activities, an “acyl-ACP reductase” or “acyl-ACP dehydrogenase” as used herein is capable of catalyzing the conversion (reduction) of acyl-ACP to an acyl aldehyde (see Schirmer et al., supra) and the concomitant oxidation of NAD(P)H to NADP⁺. In some embodiments, the acyl-ACP reductase preferentially interacts with acyl-ACP, and does not interact significantly with acyl-CoA, i.e., it does not significantly catalyze the conversion of acyl-CoA to acyl aldehyde.

[0178] Acyl-ACP reductases can be derived from a variety of plants and bacteria, included photosynthetic microorganisms such as Cyanobacteria. One exemplary acyl-ACP reductase is encoded by orf1594 of Synechococcus elongatus PCC7942 (see SEQ ID NOs:1 and 2 for the polynucleotide and polypeptide sequences, respectively). Another exemplary acyl-ACP reductase is encoded by orfsll0209 of Synechocystis sp. PCC6803 (SEQ ID NOs:3 and 4 for the polynucleotide and polypeptide sequences, respectively).

[0179] Alcohol Dehydrogenases. Embodiments of the present invention optionally include one or more alcohol dehydrogenase polypeptides. Examples of alcohol dehydrogenases include those capable of using acyl or fatty aldehydes (e.g., one or more of nonyl-aldehyde, C₁₂, C₁₄, C₁₆, C₁₈, C₂₀ fatty aldehyde) as a substrate, and converting them into fatty alcohols. Specific examples include long-chain alcohol dehydrogenases, capable of using long-chain aldehydes (e.g., C₁₆, C₁₈, C₂₀) as substrates. In certain embodiments, the alcohol dehydrogenase is naturally-occurring or endogenous to the modified microorganism, and is sufficient to convert increased acyl aldehydes (produced by acyl-ACP reductase) into fatty alcohols, and thereby contribute to increased wax ester production and overall satisfactory growth characteristics. In certain embodiments, the alcohol dehydrogenase is derived from a microorganism that differs from the one being modified.

[0180] In these and related embodiments, expression or overexpression of an alcohol dehydrogenase may increase shunting of acyl aldehydes towards production of fatty alcohols, and away from production of other products such as alkanes, fatty acids, or triglycerides. When combined with one or more wax ester synthases, such as DGAT or other enzyme having wax ester synthase activity (e.g., the ability to convert fatty alcohols into wax esters), alcohol dehydrogenases may contribute to production of wax esters. They may also reduce accumulation of potentially toxic acyl aldehydes, and thereby improve growth characteristics of a modified microorganism.

[0181] Non-limiting examples of alcohol dehydrogenases include those encoded by slr1192 of Synechocystis sp. PCC6803 (SEQ ID NOS:104-105) and ACIAD3612 of Acinetobacter baylyi (SEQ ID NOS:106-107). Also included are homologs or paralogs thereof, functional equivalents thereof, and fragments or variants thereofs. Functional equivalents can include alcohol dehydrogenases with the ability to efficiently convert acyl aldehydes (e.g., C₆, C₈, C₁₀, C₁₂, C₁₄, C₁₆, C₁₈, C₂₀ aldehydes) into fatty alcohols. Specific examples of functional equivalents include long-chain alcohol dehydrogenases, having the ability to utilize long-chain aldehydes (e.g., C₁₆, C₁₈, C₂₀) as substrates.

[0182] In particular embodiments, the alcohol dehydrogenase has the amino acid sequence of SEQ ID NO:105 (encoded by the polynucleotide sequence of SEQ ID NO:104), or an active fragment or variant of this sequence. In some embodiments, the alcohol dehydrogenase has the amino acid sequence of SEQ ID NO:107 (encoded by the polynucleotide sequence of SEQ ID NO:106), or an active fragment or variant of this sequence.

[0183] Aldehyde Dehydrogenases. Embodiments of the present invention optionally include one or more overexpressed or introduced aldehyde dehydrogenases. Examples of aldehyde dehydrogenases include enzymes capable of using acyl aldehydes (e.g., nonyl-aldehyde, C16 fatty aldehyde) as a substrate, and converting them into fatty acids. In certain embodiments, the aldehyde dehydrogenase is naturally-occurring or endogenous to the modified microorganism, and is sufficient to convert increased acyl aldehydes (produced by acyl-ACP reductase) into fatty acids, and thereby contribute to increased fatty acid production and overall satisfactory growth characteristics.

[0184] In certain embodiments, the aldehyde dehydrogenase can be overexpressed, for example, by recombinantly introducing a polynucleotide that encodes the enzyme, increasing expression of an endogenous enzyme, or both. An aldehyde dehydrogenase can be overexpressed in a strain that already expresses a naturally-occurring or endogenous enzyme, to further increase fatty acid production of an acyl-ACP reductase over-expressing strain and/or improve its growth characteristics, relative, for example, to an acyl-ACP reductase-overexpressing strain that only expresses endogenous aldehyde dehydrogenase. An aldehyde dehydrogenase can also be expressed or overexpressed in a strain that does not have a naturally occurring aldehyde dehydrogenase of that type, e.g., it does not naturally express an enzyme that is capable of efficiently converting acyl aldehydes such as nonyl-aldehyde into fatty acids.

[0185] In these and related embodiments, expression or overexpression of an aldehyde dehydrogenase may increase shunting of acyl aldehydes towards production of fatty acids, and away from production of other products such as alkanes. It may also reduce accumulation of potentially toxic acyl aldehydes, and thereby improve growth characteristics of a modified microorganism.

[0186] One exemplary aldehyde dehydrogenase is encoded by orf0489 of Synechococcus elongatus PCC7942. Also included are homologs or paralogs thereof, functional equivalents thereof, and fragments or variants thereof. Functional equivalents can include aldehyde dehydrogenases with the ability to efficiently convert acyl aldehydes (e.g., nonyl-aldehyde) into fatty acids. In specific embodiments, the aldehyde dehydrogenase has the amino acid sequence of SEQ ID NO:103 (encoded by the polynucleotide sequence of SEQ ID NO:102), or an active fragment or variant of this sequence.

[0187] Particular embodiments include photosynthetic microorganisms having reduced expression and/or activity of one or more aldehyde dehydrogenases, for instance, in the production of wax esters. Included are mutations (e.g., genomic) that reduce or eliminate the enzymatic activity of one or more endogenous aldehyde dehydrogenases, such as point mutations, insertions, or full or partial deletion mutations. Specific embodiments include a modified Synechococcus elongatus PCC7942 having a full or partial deletion of orf0489.

[0188] Aldehyde Decarbonylases. Certain embodiments include photosynthetic microorganisms having reduced expression and/or activity of one or more aldehyde decarbonylases. As used herein, an “aldehyde decarbonylase” is capable of catalyzing the conversion of an acyl aldehyde (or fatty aldehyde) to an alkane or alkene. Included are members of the ferritin-like or ribonucleotide reductase-like family of nonheme diiron enzymes (see, e.g., Stubbe et al., Trends Biochem Sci. 23:438-43, 1998).

[0189] According to one non-limiting theory, because the aldehyde decarbonylase encoded by PCC7942_orf1593 (from Synechococcus) or PCC6803_orfsll0208 (from Synechostis sp. PCC6803) utilizes acyl aldehyde as a substrate for alkane or alkene production, reducing expression of this protein may further increase yields of free fatty acids by shunting acyl aldehydes (produced by acyl-ACP reductase) away from an alkane-producing pathway, and towards a fatty acid-producing pathway. PCC7942_orf1593 and PCC6803_orfsll0208 orthologs can be found, for example, in N. punctiforme PCC73102, Thermosynechococcus elongatus BP-1, Synechococcus sp. Ja-3-3AB, P. marinus MIT9313, P. marinus NATL2A, and Synechococcus sp. RS 9117, the latter having at least two paralogs (RS 9117-1 and -2).

[0190] Particular embodiments include mutations (e.g., genomic) that reduce or eliminate the enzymatic activity of one or more endogenous aldehyde decarbonylases, for instance, in the production of fatty acids or wax esters, optionally in combination with reduced expression of one or more endogenous aldehyde dehydrogenases. Also included are point mutations, insertions, and full or partial deletions of an endogenous gene encoding an aldehyde decarbonylase. Specific embodiments include a modified Synechococcus elongatus PCC7942 having a full or partial deletion of orf1593.

[0191] Thioesterases. Certain embodiment include one or more exogenous or overexpressed thioesterase enzymes, optionally in combination with at least one of an introduced ACP enzyme, an introduced Aas enzyme, or both. For instance, one embodiment relates to the use an introduced ACP and/or Aas to increase the growth and/or fatty acid production of a free fatty acid producing TES strain, such as a TesA strain or a FatB strain (i.e., a strain having an introduced TesA or FatB). Thioesterases, as referred to herein, exhibit esterase activity (splitting of an ester into acid and alcohol, in the presence of water) specifically at a thiol group. Fatty acids are often attached to cofactor molecules, such as coenzyme A (CoA) and acyl carrier protein (ACP), by thioester linkages during the process of de novo fatty acid synthesis. Certain embodiments employ thioesterases having acyl-ACP thioesterase activity, acyl-CoA thioesterase activity, or both activities. Examples of thioesterases having both activities (i.e., acyl-ACP/acyl-CoA thioesterases) include TesA and related embodiments. In certain embodiments, a selected thioesterase has acyl-ACP thioesterase activity but not acyl-CoA thioesterase activity. Examples of thioesterases having only acyl-ACP thioesterase activity include the FatB thioesterases and related embodiments.

[0192] Certain thioesterases have both thioesterase activity and lysophospholipase activity. Specific examples of thioesterases include TesA, TesB, and related embodiments. Certain embodiments may employ periplasmically-localized or cytoplasmically-localized enzymes that thioesterase activity, such as E. coli TesA or E. coli TesB. For instance, wild type TesA, being localized to the periplasm, is normally used to hydrolyze thioester linkages of fatty acid-ACP (acyl-ACP) or fatty acid-CoA (acyl-CoA) compounds scavenged from the environment. A mutant thioesterase, PldC (referred to interchangeably as PldC/*TesA or *TesA), is not exported to the periplasm due to deletion of an N-terminal amino acid sequence required for proper transport of TesA from the cytoplasm to the periplasm. This deletion results in a cytoplasmic-localized PldC(*TesA) protein that has access to endogenous acyl-ACP and acyl-CoA intermediates. Other mutations or deletions in the N-terminal region of TesA can be used to achieve the same result, i.e., a cytoplasmic TesA.

[0193] Overexpressed PldC(*TesA) results in hydrolysis of acyl groups from endogenous acyl-ACP and acyl-CoA molecules. Cells expressing PldC(*TesA) must channel additional cellular carbon and energy to maintain production of acyl-ACP and acyl-coA molecules, which are required for membrane lipid synthesis. Thus, PldC(*TesA) expression results in a net increase in total cellular lipid content. For instance, PldC(*TesA) expressed alone in Synechococcus doubles the total lipid content from 10% of biomass to 20% of biomass, a result that can be further increased by combining *TesA or related molecules with an introduced ACP and/or an introduced Aas. Hence, certain embodiments employ an exogenous or overexpressed cytoplasmic TesA (such as *TesA) in combination with an exogenous or overexpressed ACP, an exogenous or overexpressed Aas, or both.

[0194] In certain embodiments, a thioesterase (TES) is an acyl-ACP thioesterase and/or an acyl-CoA thioesterase. In particular embodiments, the TES is a TesA or TesB polypeptide from E. coli, or a cytoplasmic TesA variant (*TesA) variant having the sequence set forth in SEQ ID NO:121, or a fragment or variant thereof.

[0195] Certain thioesterases have thioesterase activity only, i.e., they have little or no lysophospholipase activity. Examples of these thioesterases include enzymes of the FatB family. FatB encoded enzymes typically hydrolyze saturated C14-C18 ACPs, preferentially 16:0 ACP, but they can also hydrolyze 18:1 ACP. The production of medium chain (C8-C12) fatty acids in plants or seeds such as those of Cuphea spp. often results of FatB enzymes that have chain length specificities for medium chain fatty acyl-ACPs. These medium chain FatB thioesterases are present in many species with medium-chain fatty acids in their oil, including, for example, California bay laurel, coconut, and elm, among others. Hence, FatB sequences may be derived from these and other organisms. Particular examples include plant FatB acyl-ACP thioesterases such as C8, C12, C14, and C16 FatB thioesterases. Hence, in certain embodiments, the TES is a FatB polypeptide, such as a C8, C12, C14, C16, or C18 FatB.

[0196] Specific examples of FatB thioesterases include the Cuphea hookeriana C8/C10 FatB thioesterase, the Umbellularia californica C12 FatB1 thioesterase, the Cinnamomum camphora C14 FatB1 thioesterase, and the Cuphea hookeriana C16 FatB1 thioesterase. In specific embodiments, the thioesterase is a Cuphea hookeriana C8/C10 FatB, comprising the amino acid sequence of SEQ ID NO:108 (full-length protein) or SEQ ID NO:109 (mature protein without signal sequence). In particular embodiments, the thioesterase is a Umbellularia californica C12 FatB1, comprising the amino acid sequence of SEQ ID NO:110 (full-length protein) or SEQ ID NO:111 (mature protein without signal sequence). In certain embodiments, the thioesterase is a Cinnamomum camphora C14 FatB1, comprising the amino acid sequence of SEQ ID NO:112 (full-length protein) or SEQ ID NO:113 (mature protein without signal sequence). In particular embodiments, the thioesterase is a Cuphea hookeriana C16 FatB1, comprising the amino acid sequence of SEQ ID NO:114 (full-length protein) or SEQ ID NO:115 (mature protein without signal sequence).

[0197] Acetyl Coenzyme A carboxylases (ACCase). Embodiments of the present invention optionally include one or more exogenous (e.g., recombinantly introduced) or overexpressed ACCase proteins. As used herein, an “acetyl CoA carboxylase” gene includes any polynucleotide sequence encoding amino acids, such as protein, polypeptide or peptide, obtainable from any cell source, which demonstrates the ability to catalyze the carboxylation of acetyl-CoA to produce malonyl-CoA under enzyme reactive conditions, and further includes any naturally-occurring or non-naturally occurring variants of an acetyl-CoA carboxylase sequence having such ability.

[0198] Acetyl-CoA carboxylase (ACCase) is a biotin-dependent enzyme that catalyses the irreversible carboxylation of acetyl-CoA to produce malonyl-CoA through its two catalytic activities, biotin carboxylase (BC) and carboxyltransferase (CT). The biotin carboxylase (BC) domain catalyzes the first step of the reaction: the carboxylation of the biotin prosthetic group that is covalently linked to the biotin carboxyl carrier protein (BCCP) domain. In the second step of the reaction, the carboxyltransferase (CT) domain catalyzes the transfer of the carboxyl group from (carboxy) biotin to acetyl-CoA. Formation of malonyl-CoA by acetyl-CoA carboxylase (ACCase) represents the commitment step for fatty acid synthesis, because malonyl-CoA has no metabolic role other than serving as a precursor to fatty acids. Because of this reason, acetyl-CoA carboxylase represents a pivotal enzyme in the synthesis of fatty acids.

[0199] In most prokaryotes, ACCase is a multi-subunit enzyme, whereas in most eukaryotes it is a large, multi-domain enzyme. In yeast, the crystal structure of the CT domain of yeast ACCase has been determined at 2.7 A resolution (Zhang et al., Science, 299:2064-2067 (2003). This structure contains two domains, which share the same backbone fold. This fold belongs to the crotonase/ClpP family of proteins, with a b-b-a superhelix. The CT domain contains many insertions on its surface, which are important for the dimerization of ACCase. The active site of the enzyme is located at the dimer interface.

[0200] Although Cyanobacteria, such as Synechococcus, express a native ACCase enzyme, these bacteria typically do not produce or accumulate significant amounts of fatty acids. For example, Synechococcus in the wild accumulates fatty acids in the form of lipid membranes to a total of about 4% by dry weight.

[0201] Given the role of ACCase in the commitment step of fatty acid biosynthesis, embodiments of the present invention include methods of increasing the production of fatty acid biosynthesis, and, thus, lipid production, in Cyanobacteria by introducing one or more polynucleotides that encode an ACCase enzyme that is exogenous to the Cyanobacterium's native genome. Embodiments of the present invention also include a modified Cyanobacterium, and compositions comprising said Cyanobacterium, comprising one or more polynucleotides that encode an ACCase enzyme that is exogenous to the Cyanobacterium's native genome.

[0202] A polynucleotide encoding an ACCase enzyme may be isolated or obtained from any organism, such as any prokaryotic or eukaryotic organism that contains an endogenous ACCase gene. Examples of eukaryotic organisms having an ACCase gene are well-known in the art, and include various animals (e.g., mammals, fruit flies, nematodes), plants, parasites, and fungi (e.g., yeast such as S. cerevisiae and Schizosaccharomyces pombe). In certain embodiments, the ACCase encoding polynucleotide sequences are obtained from Synechococcus sp. PCC7002.

[0203] Examples of prokaryotic organisms that may be utilized to obtain a polynucleotide encoding an enzyme having ACCase activity include, but are not limited to, Escherichia coli, Legionella pneumophila, Listeria monocytogenes, Streptococcus pneumoniae, Bacillus subtilis, Ruminococcus obeum ATCC 29174, marine gamma proteobacterium HTCC2080, Roseovarius sp. HTCC2601, Oceanicola granulosus HTCC2516, Bacteroides caccae ATCC 43185, Vibrio alginolyticus 12G01, Pseudoalteromonas tunicata D2, Marinobacter sp. ELB17, marine gamma proteobacterium HTC C2143, Roseobacter sp. SK209-2-6, Oceanicola batsensis HTCC2597, Rhizobium leguminosarum bv. trifolii WSM1325, Nitrobacter sp. Nb-311A, Chloroflexus aggregans DSM 9485, Chlorobaculum parvum, Chloroherpeton thalassium, Acinetobacter baumannii, Geobacillus, and Stenotrophomonas maltophilia, among others.

[0204] Particular exemplary acetyl-CoA carboxylases (ACCase) comprise or consist of a polypeptide sequence set forth in any of SEQ ID NOs:55, 45, 46, 47, 48 or 49, or a fragment or variant thereof. SEQ ID NO:55 is the sequence of Saccharomyces cerevisiae acetyl-CoA carboxylase (yAcc1); SEQ ID NO:45 is Synechococcus sp. PCC 7002 AccA; SEQ ID NO:46 is Synechococcus sp. PCC 7002 AccB; SEQ ID NO:47 is Synechococcus sp. PCC 7002 AccC; and SEQ ID NO:48 is Synechococcus sp. PCC 7002 AccD; and SEQ ID NO:49 is a Triticum aestivum ACCase. In certain embodiments, the introduced ACCase is not native to the genome of the modified photosynthetic microorganism.

[0205] Phosphatidic Acid Phosphatases (PAP). As used herein, a “phosphatidate phosphatase” or “phosphatidic acid phosphatase” gene includes any polynucleotide sequence encoding amino acids, such as protein, polypeptide or peptide, obtainable from any cell source, which demonstrates the ability to catalyze the dephosphorylation of phosphatidate (PtdOH) under enzyme reactive conditions, yielding diacylglycerol (DAG) and inorganic phosphate, and further includes any naturally-occurring or non-naturally occurring variants of a phosphatidate phosphatase sequence having such ability.

[0206] Phosphatidate phosphatases (PAP, 3-sn-phosphatidate phosphohydrolase) catalyze the dephosphorylation of phosphatidate (PtdOH), yielding diacylglycerol (DAG) and inorganic phosphate. This enzyme belongs to the family of hydrolases, specifically those acting on phosphoric monoester bonds. The systematic name of this enzyme class is 3-sn-phosphatidate phosphohydrolase. Other names in common use include phosphatic acid phosphatase, acid phosphatidyl phosphatase, and phosphatic acid phosphohydrolase. This enzyme participates in at least 4 metabolic pathways: glycerolipid metabolism, glycerophospholipid metabolism, ether lipid metabolism, and sphingolipid metabolism.

[0207] PAP enzymes have roles in both the synthesis of phospholipids and triacylglycerol through its product diacylglycerol, as well as the generation or degradation of lipid-signaling molecules in eukaryotic cells. PAP enzymes are typically classified as either Mg²⁺-dependent (referred to as PAP1 enzymes) or Mg²⁺-independent (PAP2 or lipid phosphate phosphatase (LPP) enzymes) with respect to their cofactor requirement for catalytic activity. In both yeast and mammalian systems, PAP2 enzymes are known to be involved in lipid signaling. By contrast, PAP1 enzymes, such as those found in Saccharomyces cerevisiae, play a role in de novo lipid synthesis (Han, et al. J Biol Chem. 281:9210-9218, 2006), thereby revealing that the two types of PAP are responsible for different physiological functions.

[0208] In both yeast and higher eukaryotic cells, the PAP reaction is the committed step in the synthesis of the storage lipid triacylglycerol (TAG), which is formed from PtdOH through the intermediate DAG. The reaction product DAG is also used in the synthesis of the membrane phospholipids phosphatidylcholine (PtdCho) and phosphatidylethanolamine. The substrate PtdOH is used for the synthesis of all membrane phospholipids (and the derivative inositol-containing sphingolipids) through the intermediate CDP-DAG. Thus, regulation of PAP activity might govern whether cells make storage lipids and phospholipids through DAG or phospholipids through CDP-DAG. In addition, PAP is involved in the transcriptional regulation of phospholipid synthesis.

[0209] PAP1 enzymes have been purified and characterized from the membrane and cytosolic fractions of yeast, including a gene (Pah1, formerly known as Smp2) been identified to encode a PAP1 enzyme in S. cerevisiae. The Pah1-encoded PAP1 enzyme is found in the cytosolic and membrane fractions of the cell, and its association with the membrane is peripheral in nature. As expected from the multiple forms of PAP1 that have been purified from yeast, pah1Δ mutants still contain PAP1 activity, indicating the presence of an additional gene or genes encoding enzymes having PAP 1 activity.

[0210] Analysis of mutants lacking the Pah1-encoded PAP1 has provided evidence that this enzyme generates the DAG used for lipid synthesis. Cells containing the pah1Δ mutation accumulate PtdOH and have reduced amounts of DAG and its acylated derivative TAG. Phospholipid synthesis predominates over the synthesis of TAG in exponentially growing yeast, whereas TAG synthesis predominates over the synthesis of phospholipids in the stationary phase of growth. The effects of the pah1Δ mutation on TAG content are most evident in the stationary phase. For example, stationary phase cells devoid of the Pah1 gene show a reduction of >90% in TAG content. Likewise, the pah1Δ mutation shows the most marked effects on phospholipid composition (e.g. the consequent reduction in PtdCho content) in the exponential phase of growth. The importance of the Pah1-encoded PAP1 enzyme to cell physiology is further emphasized because of its role in the transcriptional regulation of phospholipid synthesis.

[0211] The requirement of Mg²⁺ ions as a cofactor for PAP enzymes is correlated with the catalytic motifs that govern the phosphatase reactions of these enzymes. For example, the Pah1-encoded PAP1 enzyme has a DxDxT (SEQ ID NO:198) catalytic motif within a haloacid dehalogenase (HAD)-like domain (“x” is any amino acid). This motif is found in a superfamily of Mg²⁺-dependent phosphatase enzymes, and its first aspartate residue is responsible for binding the phosphate moiety in the phosphatase reaction. By contrast, the DPP1- and LPP1-encoded PAP2 enzymes contain a three-domain lipid phosphatase motif that is localized to the hydrophilic surface of the membrane. This catalytic motif, which comprises the consensus sequences KxxxxxxRP (domain 1) (SEQ ID NO:116), PSGH (domain 2) (SEQ ID NO:117), and SRxxxxxHxxxD (domain 3) (SEQ ID NO:118), is shared by a superfamily of lipid phosphatases that do not require Mg²⁺ ions for activity. The conserved arginine residue in domain 1 and the conserved histidine residues in domains 2 and 3 may be essential for the catalytic activity of PAP2 enzymes. Accordingly, a phosphatidate phosphatase polypeptide may comprise one or more of the above-described catalytic motifs.

[0212] A polypeptide having a phosphatidate phosphatase enzymatic activity may be obtained from any organism having a suitable, endogenous phosphatidate phosphatase gene. Examples of organisms that may be used to obtain a phosphatidate phosphatase encoding polynucleotide sequence include, but are not limited to, Homo sapiens, Mus musculus, Rattus norvegicus, Bos taurus, Drosophila melanogaster, Arabidopsis thaliana, Magnaporthe grisea, Saccharomyces cerevisiae, Schizosaccharomyces pombe, Cryptococcus neoformans, and Bacillus pumilus, among others. Specific examples of PAP enzymes include Pah1 from S. cerevisiae, PgpB from E. coli, and PAP from PCC6803.

[0213] In specific embodiments, a phosphatidate phosphatase polypeptide comprises or consists of a polypeptide sequence set forth in SEQ ID NO:131, or a fragment or variant thereof. SEQ ID NO:131 is the sequence of Saccharomyces cerevisiae phosphatidate phosphatase (yPah1). In certain embodiments, the polypeptide sequence of the PAP is encoded by the E. coli PgpB gene, and/or the PAP gene from Synechocystis sp. PCC6803.

[0214] Triacylglycerol (TAG) Hydrolases. Certain embodiments relate to the use of exogenous or overexpressed TAG hydrolases (or TAG lipases) to increase production of TAGs in a TAG-producing strain. For instance, specific embodiments may utilize a TAG hydrolase in combination with a DGAT, and optionally a TES. These embodiments may then further utilize an ACP, an Aas, or both, any of the lipid biosynthesis proteins described herein, and/or any of the modifications to glycogen production and storage described herein. Hence, as noted above, TAG hydrolases may be used in TAG-producing strains (e.g., DGAT-expressing strains) with or without an ACP or Aas.

[0215] TAG hydrolases are carboxylesterases that are typically specific for insoluble long chain fatty acid TAGs. Carboxylesterases catalyze the chemical reaction:

carboxylic ester+H₂O [symbol] alcohol+carboxylate

[0216] Thus, the two substrates of this enzyme are carboxylic ester and H₂O, whereas its two products are alcohol and carboxylate. According to one non-limiting theory, it is understood that TAG hydrolase expression (or overexpression) in a TAG producing strain (e.g., DGAT/ACP, DGAT/Aas, DGAT/ACP/Aas) releases acyl chains to not only increase accumulation of free fatty acids (FFA), but also increase the amount of free 1, 2 diacylglycerol (DAG). This free DAG then serves as a substrate for DGAT, and thereby allows increased TAG production, especially in the presence of over-expressed ACP, Aas, or both. Accordingly, certain embodiments employing a TAG hydrolase produce increased amounts of TAG, relative, for example, to a DGAT only-expressing microorganism. In specific embodiments, the TAG hydrolase is specific for TAG and not DAG, i.e., it preferentially acts on TAG relative to DAG.

[0217] Non-limiting examples of TAG hydrolases include SDP1 (SUGAR-DEPENDENT1) triacylglycerol lipase from Arabidopsis thaliana (SEQ ID NO:170), ACIAD1335 from Acinetobacter sp. ADP1 (SEQ ID NO:171), TG14P from S. cerevisiae (SEQ ID NO:172), and RHA1_ro04722 (YP_{—}704665) TAG lipase from Rhodococcus (SEQ ID NO:173). Additional putative lipases/esterases from Rhodococcus include RHA1_ro01602 lipase/esterase (see SEQ ID NOs:156 and 174 for polynucleotide and polypeptide sequence, respectively), and RHA1_ro06856 lipase/esterase (see SEQ ID NOs:119 and 120 for polynucleotide and polypeptide sequence, respectively).

[0218] Fatty Acyl-CoA Synthetases. Certain embodiments relate to the use of overexpressed fatty acyl-CoA synthetases to increase activation of fatty acids, and thereby increase production of TAGs in a TAG-producing strain (e.g., a DGAT-expressing strain). For instance, specific embodiments may utilize an acyl-ACP reductase in combination with a fatty acyl-CoA synthetase and a DGAT. These embodiments may then further utilize an ACP, an ACCase, or both, and/or any of the modifications to glycogen production and storage or glycogen breakdown described herein.

[0219] Fatty acyl-CoA synthetases activate fatty acids for metabolism by catalyzing the formation of fatty acyl-CoA thioesters. Fatty acyl-CoA thioesters can then serve not only as substrates for beta-oxidation, at least in bacteria capable of growing on fatty acids as a sole source of carbon (e.g., E. coli, Salmonella), but also as acyl donors in phospholipid biosynthesis. Many fatty acyl-CoA synthetases are characterized by two highly conserved sequence elements, an ATP/AMP binding motif, which is common to enzymes that form an adenylated intermediate, and a fatty acid binding motif.

[0220] According to one non-limiting theory, certain embodiments may employ fatty acyl-CoA synthetases to increase activation of free fatty acids, which can then be incorporated into TAGs, mainly by the DGAT-expressing (and thus TAG-producing) photosynthetic microorganisms described herein. Hence, fatty acyl-CoA synthetases can be used in any of the embodiments described herein, such as those that produce increased levels of free fatty acids, where it is desirable to turn free fatty acids into TAGs. As noted above, these free fatty acids can then be activated by fatty acyl-CoA synthetases to generate acyl-CoA thioesters, which can then serve as substrates by DGAT to produce increased levels of TAGs.

[0221] One exemplary fatty acyl-CoA synthetase includes the FadD gene from E. coli (SEQ ID NOS:16 and 17 for nucleotide and polypeptide sequence, respectively), which encodes a fatty acyl-CoA synthetase having substrate specificity for medium and long chain fatty acids. Other exemplary fatty acyl-CoA synthetases include those derived from S. cerevisiae; Faa1p can use C12-C16 acyl-chains in vitro (see SEQ ID NOS:18 and 19 for nucleotide and polypeptide sequence, respectively), Faa2p shows a less restricted specificity ranging from C7-C17 (see SEQ ID NOS:20 and 21 for nucleotide and polypeptide sequence, respectively), and Faa3p, together with that of DGAT1, enhances lipid accumulation in the presence of exogenous fatty acids in S. cerevisiae (see SEQ ID NO:22 and 23 for nucleotide and polypeptide sequence, respectively). SEQ ID NO:22 is codon-optimized for expression in S. elongatus PCC7942.

[0222] Lipases/Phospholipases. In various embodiments, modified photosynthetic microorganisms, e.g., Cyanobacteria, of the present invention further comprise one or more exogenous or introduced nucleic acids that encode a polypeptide having a lipase or phospholipase activity, or a fragment or variant thereof. Lipases, including phospholipases, lysophospholipases, thioesterases, and enzymes having one, two, or all three of these activities, typically catalyze the hydrolysis of ester chemical bonds in lipid substrates. Without wishing to be bound by any one theory, in certain exemplary embodiments the expression of one or more phospholipases can generate fatty acids from membrane lipids, which may then be used by the ACP and/or Aas to make acyl-ACPs. These acyl-ACPs, for example, can then feed into the triglyceride synthesis pathways, thereby increasing triglyceride (TAG) production.

[0223] A phospholipase is an enzyme that hydrolyzes phospholipids into fatty acids and other lipophilic substances. There are four major classes, termed A, B, C and D distinguished by what type of reaction they catalyze. Phospholipase A1 cleaves the SN-1 acyl chain, while Phospholipase A2 cleaves the SN-2 acyl chain, releasing arachidonic acid. Phospholipase B cleaves both SN-1 and SN-2 acyl chains, and is also known as a lysophospholipase. Phospholipase C cleaves before the phosphate, releasing diacylglycerol and a phosphate-containing head group. Phospholipases C play a central role in signal transduction, releasing the second messenger, inositol triphosphate. Phospholipase D cleaves after the phosphate, releasing phosphatidic acid and an alcohol. Types C and D are considered phosphodiesterases. In various embodiments, one or more phospholipase from any one of these classes may be used, alone or in any combination.

[0224] As noted above, phospholipases (PLA1,2) act on phospholipids of different kinds including phosphatidyl glycerol, the major phospholipid in Cyanobacteria, by cleaving the acyl chains off the sn1 or sn2 positions (carbon 1 or 2 on the glycerol backbone); some are selective for sn1 or sn2, others act on both. Lysophospholipases act on lysophospholipids, which can be the product of phospholipases or on lysophosphatidic acid, a normal intermediate of the de novo phosphatidic acid synthesis pathway, e.g., 1-acyl-DAG-3-phosphate.

[0225] Merely by way of non-limiting theory, it is understood that in certain embodiments, phospholipases and/or lysophospholipases can cleave off acyl chains from phospholipids or lysophospholipids and thus deregulate the normal recycling of the lipid membranes, including both cell membrane and thylakoid membranes, which then leads to accumulation of free fatty acids (FFAs). In certain embodiments (e.g., TesA strains), these FFAs may accumulate extracellularly. In other embodiments (e.g., ACP and/or Aas over-expressing microorganisms), FFAs can be converted into acyl-ACPs by acyl ACP synthase (Aas) in a strain that also over-expresses ACP. In specific embodiments (e.g., DGAT-containing microorganisms), these acyl-ACPs can then serve as substrates for DGAT to make TAGs.

[0226] In other embodiments, phospholipases can be over-expressed to generate lyshophospholipids and acyl chains. The lysophospholipids can then serve as substrates for a lysophospholipase, which cleaves off the remaining acyl chain. In some embodiments, these acyl chains can either accumulate as FFAs, or in other embodiments may serve as substrates of Acyl ACP synthase (Aas) to generate acyl-ACPs, which can then be used by DGAT to make TAGs.

[0227] Particular examples of phospholipase C enzymes include those derived from eukaryotes such as mammals and parasites, in addition to those derived from bacteria. Examples include phosphoinositide phospholipase C (EC 3.1.4.11), the main form found in eukaryotes, especially mammals, the zinc-dependent phospholipase C family of bacterial enzymes (EC 3.1.4.3) that includes alpha toxins, phosphatidylinositol diacylglycerol-lyase (EC 4.6.1.13), a related bacterial enzyme, and glycosylphosphatidylinositol diacylglycerol-lyase (EC 4.6.1.14), a trypanosomal enzyme.

[0228] In particular embodiments, the present invention contemplates using a lysophospholipase. A lysophospholipase is an enzyme that catalyzes the chemical reaction:

2-lysophosphatidic acid+H₂O [symbol] glycerol-3-phosphate+a carboxylate

[0229] Thus, the two substrates of this enzyme are 2-lysophosphatidylcholine and H₂O, whereas its two products are glycerophosphocholine and carboxylate.

[0230] Lysophospholipase are members of the hydrolase family, specifically those acting on carboxylic ester bonds. Lysophospholipases participate in glycerophospholipid metabolism. Examples of lysophospholipases include, but are not limited to, 2-Lysophosphatidylcholine acylhydrolase, Lecithinase B, Lysolecithinase, Phospholipase B, Lysophosphatidase, Lecitholipase, Phosphatidase B, Lysophosphatidylcholine hydrolase, Lysophospholipase A1, Lysophospholipase L1 (TesA), Lysophopholipase L2, TesB, Lysophospholipase transacylase, Neuropathy target esterase, NTE, NTE-LysoPLA, NTE-lysophospholipase, and Vu Patatin 1 protein. In particular embodiments, lysophospholipases utilized according to the present invention are derived from a bacteria, e.g., E. coli, or a plant. Any of these lysophospholipases may be used according to various embodiments of the present invention.

[0231] Certain lysophospholipases, such as Lysophospholipase L1 (also referred to as PldC or TesA) are periplasmically-localized or cytoplasmically-localized enzymes that have both lysophospholipase and thioesterase activity, as described above. Hence, certain thioesterases such as TesA can also be characterized as lysophospholipases. A mutant lysophospholipase described herein, PldC(*TesA), is not exported to the periplasm due to deletion of an N-terminal amino acid sequence required for proper transport of TesA from the cytoplasm to the periplasm. This results in a cytoplasmic-localized PldC(*TesA) protein that has access to endogenous acyl-ACP and acyl-CoA intermediates. Overexpressed PldC(*TesA) results in hydrolysis of acyl groups from endogenous acyl-ACP and acyl-CoA molecules. Cells expressing PldC(*TesA) must channel additional cellular carbon and energy to maintain production of acyl-ACP and acyl-coA molecules, which are required for membrane lipid synthesis. Thus, PldC(*TesA) expression results in a net increase in cellular lipid content. As described herein, PldC(*TesA) is expressed in Synechococcus lipid content doubles from 10% of biomass to 20% of biomass.

[0232] In certain embodiments, lysophospholipases utilized according to the present invention have both phospholipase and thioesterase activities. Examples of lysophospholipases that have both activities include, e.g., Lysophospholipase L1 (TesA), such as E. coli Lysophospholipase L1, as well as fragments and variants thereof, including those described in the paragraph above. As a phospholipase, certain embodiments may employ TesA variants having only lysophospholipase activity, including variants with reduced or no thioesterase activity.

[0233] In particular embodiments, the phospholipase is a bacterial phospholipase, e.g., lysophospholipase, or a fragment or variant thereof, e.g., a phospholipase derived from Escherichia coli, S. cerevisiae, Rhodococcus, Streptomyces or Acinetobacter species.

[0234] Additional non-limiting examples of phospholipases include phospholipase A1 (PldA) from Acinetobacter sp. ADP1, phospholipase A (PldA) from E. coli, phospholipase from Streptomyces coelicolor A3(2), phospholipase A2 (PLA2-α) from Arabidopsis thaliana; phospholipase A1/triacylglycerol lipase (DAD1; Defective Anther Dehiscence 1) from Arabidopsis thaliana, chloroplast DONGLE from Arabidopsis thaliana, patatin-like protein from Arabidopsis thaliana, and patatin from Anabaena variabilis ATCC 29413. Additional non-limiting examples of lysophospholipases include phospholipase B (Plb1p) from Saccharomyces cerevisiae S288c, phospholipase B (Plb2p) from Saccharomyces cerevisiae S288c, ACIAD1057 (tesA homolog) from Acinetobacter ADP1, ACIAD1943 lysophospholipase from Acinetobacter ADP1, and a lysophospholipase (YP_{—}702320; RHA1_ro02357) from Rhodococcus.

[0235] In particular embodiments, the encoded phospholipase comprises or consists of a Lysophospholipase L1 (TesA), Lysophospholipase L2, TesB, or Vu patatin 1 protein, or a homolog, fragment, or variant thereof. In certain embodiments, the Lysophospholipase L1 (TesA), Lysophospholipase L2, or TesB is a bacterial Lysophospholipase L1 (TesA), Lysophospholipase L2, or TesB, such as an E. coli Lysophospholipase L1 (TesA) having the wild-type sequence set forth in SEQ ID NO:133, an E. coli Lysophospholipase L2 having the wild-type sequence set forth in SEQ ID NO:137, or an E. coli TesB having the wild-type sequence set forth in SEQ ID NO:134. In particular embodiment, the Vu patatin 1 protein has the wild-type sequence set forth in SEQ ID NO:138.

[0236] In particular embodiments, the phospholipase is modified such that it localizes predominantly to the cytoplasm instead of the periplasm. For example, the phospholipase may have a deletion or mutation in a region associated with periplasmic localization. In particular embodiments, the phospholipase variant is derived from Lysophospholipase L1 (TesA) or TesB. In certain embodiments, the Lysophospholipase L1 (TesA) or TesB variant is a bacterial Lysophospholipase L1 (TesA) or TesB variant, such as a cytoplasmic E. coli Lysophospholipase L1 (PldC(*TesA)) variant having the sequence set forth in SEQ ID NO:121.

[0237] Additional examples of phospholipase polypeptide sequences include phospholipase A1 (PldA) from Acinetobacter sp. ADP1 (SEQ ID NO:157), phospholipase A (PldA) from E. coli (SEQ ID NO:158), phospholipase from Streptomyces coelicolor A3(2) (SEQ ID NO:159), phospholipase A2 (PLA2-α) from Arabidopsis thaliana (SEQ ID NO:160). phospholipase A1/triacylglycerol lipase (DAD1; Defective Anther Dehiscence 1) from Arabidopsis thaliana (SEQ ID NO:161), chloroplast DONGLE from Arabidopsis thaliana (SEQ ID NO:162), patatin-like protein from Arabidopsis thaliana (SEQ ID NO:163), and patatin from Anabaena variabilis ATCC 29413 (SEQ ID NO:164). Additional non-limiting examples of lysophospholipase polypeptide sequences include phospholipase B (Plb1p) from Saccharomyces cerevisiae S288c (SEQ ID NO:165), phospholipase B (Plb2p) from Saccharomyces cerevisiae S288c (SEQ ID NO:166), ACIAD1057 (TesA homolog) from Acinetobacter ADP1 (SEQ ID NO:167), ACIAD1943 lysophospholipase from Acinetobacter ADP1 (SEQ ID NO:168), and a lysophospholipase (YP_{—}702320; RHA1_ro02357) from Rhodococcus (SEQ ID NO:169).

[0238] (iii) Glycogen Synthesis, Storage, and Breakdown

[0239] In particular embodiments, a modified photosynthetic microorganism further comprises additional modifications, such that it has reduced expression of one or more genes associated with a glycogen synthesis or storage pathway and/or increased expression of one or more polynucleotides that encode a protein associated with a glycogen breakdown pathway, or a functional variant of fragment thereof.

[0240] In various embodiments, modified photosynthetic microorganisms, e.g., Cyanobacteria, of the present invention have reduced expression of one or more genes associated with glycogen synthesis and/or storage. In particular embodiments, these modified photosynthetic microorganisms have a mutated or deleted gene associated with glycogen synthesis and/or storage. In particular embodiments, these modified photosynthetic microorganisms comprise a vector that includes a portion of a mutated or deleted gene, e.g., a targeting vector used to generate a knockout or knockdown of one or more alleles of the mutated or deleted gene. In certain embodiments, these modified photosynthetic microorganisms comprise an antisense RNA or siRNA that binds to an mRNA expressed by a gene associated with glycogen synthesis and/or storage.

[0241] In certain embodiments, modified photosynthetic microorganisms, e.g., Cyanobacteria, of the present invention comprise one or more exogenous or introduced nucleic acids that encode a polypeptide having an activity associated with a glycogen breakdown or triglyceride or fatty acid biosynthesis, including but not limited to any of those described herein. In particular embodiments, the exogenous nucleic acid does not comprise a nucleic acid sequence that is native to the microorganism's genome. In particular embodiments, the exogenous nucleic acid comprises a nucleic acid sequence that is native to the microorganism's genome, but it has been introduced into the microorganism, e.g., in a vector or by molecular biology techniques, for example, to increase expression of the nucleic acid and/or its encoded polypeptide in the microorganism.

[0242] Glycogen Biosynthesis and Storage. Glycogen is a polysaccharide of glucose, which functions as a means of carbon and energy storage in most cells, including animal and bacterial cells. More specifically, glycogen is a very large branched glucose homopolymer containing about 90% α-1,4-glucosidic linkages and 10% α-1,6 linkages. For bacteria in particular, the biosynthesis and storage of glycogen in the form of α-1,4-polyglucans represents an important strategy to cope with transient starvation conditions in the environment.

[0243] Glycogen biosynthesis involves the action of several enzymes. For instance, bacterial glycogen biosynthesis occurs generally through the following general steps: (1) formation of glucose-1-phosphate, catalyzed by phosphoglucomutase (Pgm), followed by (2) ADP-glucose synthesis from ATP and glucose 1-phosphate, catalyzed by glucose-1-phosphate adenylyltransferase (GlgC), followed by (3) transfer of the glucosyl moiety from ADP-glucose to a pre-existing α-1,4 glucan primer, catalyzed by glycogen synthase (GlgA). This latter step of glycogen synthesis typically occurs by utilizing ADP-glucose as the glucosyl donor for elongation of the α-1,4-glucosidic chain.

[0244] In bacteria, the main regulatory step in glycogen synthesis takes place at the level of ADP-glucose synthesis, or step (2) above, the reaction catalyzed by glucose-1-phosphate adenylyltransferase (GlgC), also known as ADP-glucose pyrophosphorylase (see, e.g., Ballicora et al., Microbiology and Molecular Biology Reviews 6:213-225,2003). In contrast, the main regulatory step in mammalian glycogen synthesis occurs at the level of glycogen synthase. As shown herein, by altering the regulatory and/or other active components in the glycogen synthesis pathway of photosynthetic microorganisms such as Cyanobacteria, and thereby reducing the biosynthesis and storage of glycogen, the carbon that would have otherwise been stored as glycogen can be utilized by said photosynthetic microorganism to synthesize other carbon-based storage molecules, such as lipids, fatty acids, and triglycerides.

[0245] Therefore, certain modified photosynthetic microorganisms, e.g., Cyanobacteria, of the present invention may comprise a mutation, deletion, or any other alteration that disrupts one or more of these steps (i.e., renders the one or more steps “non-functional” with respect to glycogen biosynthesis and/or storage), or alters any one or more of the enzymes directly involved in these steps, or the genes encoding them. As noted above, such modified photosynthetic microorganisms, e.g., Cyanobacteria, are typically capable of producing and/or accumulating an increased amount of lipids, such as fatty acids, as compared to a wild type photosynthetic microorganism. Certain exemplary glycogen biosynthesis genes are described below.

[0246] Phosphoglucomutase gene (pgm). In one embodiment, a modified photosynthetic microorganism, e.g., a Cyanobacteria, expresses a reduced amount of the phosphoglucomutase gene. In particular embodiments, it may comprise a mutation or deletion in the phosphoglucomutase gene, including any of its regulatory elements (e.g., promoters, enhancers, transcription factors, positive or negative regulatory proteins, etc.). Phosphoglucomutase (Pgm), encoded by the gene pgm, catalyzes the reversible transformation of glucose 1-phosphate into glucose 6-phosphate, typically via the enzyme-bound intermediate, glucose 1,6-biphosphate (see, e.g., Lu et al., Journal of Bacteriology 176:5847-5851, 1994). Although this reaction is reversible, the formation of glucose-6-phosphate is markedly favored.

[0247] However, typically when a large amount of glucose-6-phosphate is present, Pgm catalyzes the phosphorylation of the 1-carbon and the dephosphorylation of the c-carbon, resulting in glucose-1-phosphate. The resulting glucose-1-phosphate is then converted to UDP-glucose by a number of intermediate steps, including the catalytic activity of GlgC, which can then be added to a glycogen storage molecule by the activity of glycogen synthase, described below. Thus, under certain conditions, the Pgm enzyme plays an intermediary role in the biosynthesis and storage of glycogen.

[0248] The pgm gene is expressed in a wide variety of organisms, including most, if not all, Cyanobacteria. The pgm gene is also fairly conserved among Cyanobacteria, as can be appreciated upon comparison of SEQ ID NOs:24 (S. elongatus PCC7942), 25 (Synechocystis sp. PCC6803), and 26 (Synechococcus sp. WH8102), 79 (Synechococcus RCC307), and 80 (Synechococcus 7002), which provide the polynucleotide sequences of various pgm genes from Cyanobacteria.

[0249] Deletion of the pgm gene in Cyanobacteria, such as Synechococcus, has been demonstrated herein for the first time to reduce the accumulation of glycogen in said Cyanobacteria, and also to increase the production of other carbon-based products, such as lipids and fatty acids.

[0250] Glucose-1-Phosphate Adenylyltransferase (glgC). In one embodiment, a modified photosynthetic microorganism, e.g., a Cyanobacteria, expresses a reduced amount of a glucose-1-phosphate adenylyltransferase (glgC) gene. In certain embodiments, it may comprise a mutation or deletion in the glgC gene, including any of its regulatory elements. The enzyme encoded by the glgC gene (e.g., EC 2.7.7.27) participates generally in starch, glycogen and sucrose metabolism by catalyzing the following chemical reaction:

ATP+alpha-D-glucose 1-phosphate [symbol] diphosphate+ADP-glucose

[0251] Thus, the two substrates of this enzyme are ATP and alpha-D-glucose 1-phosphate, whereas its two products are diphosphate and ADP-glucose. The glgC-encoded enzyme catalyzes the first committed and rate-limiting step in starch biosynthesis in plants and glycogen biosynthesis in bacteria. It is the enzymatic site for regulation of storage polysaccharide accumulation in plants and bacteria, being allosterically activated or inhibited by metabolites of energy flux.

[0252] The enzyme encoded by the glgC gene belongs to a family of transferases, specifically those transferases that transfer phosphorus-containing nucleotide groups (i.e., nucleotidyl-transferases). The systematic name of this enzyme class is typically referred to as ATP:alpha-D-glucose-1-phosphate adenylyltransferase. Other names in common use include ADP glucose pyrophosphorylase, glucose 1-phosphate adenylyltransferase, adenosine diphosphate glucose pyrophosphorylase, adenosine diphosphoglucose pyrophosphorylase, ADP-glucose pyrophosphorylase, ADP-glucose synthase, ADP-glucose synthetase, ADPG pyrophosphorylase, and ADP:alpha-D-glucose-1-phosphate adenylyltransferase.

[0253] The glgC gene is expressed in a wide variety of plants and bacteria, including most, if not all, Cyanobacteria. The glgC gene is also fairly conserved among Cyanobacteria, as can be appreciated upon comparison of SEQ ID NOs:27 (S. elongatus PCC7942), 28 (Synechocystis sp. PCC6803), 29 (Synechococcus sp. PCC 7002), 30 (Synechococcus sp. WH8102), 31 (Synechococcus sp. RCC 307), 32 (Trichodesmium erythraeum IMS 101), 33 (Anabaena varibilis), and 34 (Nostoc sp. PCC 7120), which describe the polynucleotide sequences of various glgC genes from Cyanobacteria.

[0254] Deletion of the glgC gene in Cyanobacteria, such as Synechococcus, reduces the accumulation of glycogen in said Cyanobacteria, and increases the production of other carbon-based products, such as lipids and fatty acids.

[0255] Glycogen Synthase (glgA). In one embodiment, a modified photosynthetic microorganism, e.g., a Cyanobacteria, expresses a reduced amount of a glycogen synthase gene. In particular embodiments, it may comprise a deletion or mutation in the glycogen synthase gene, including any of is regulatory elements. Glycogen synthase (GlgA), also known as UDP-glucose-glycogen glucosyltransferase, is a glycosyltransferase enzyme that catalyses the reaction of UDP-glucose and (1,4-α-D-glucosyl)ₙ to yield UDP and (1,4-α-D-glucosyl)ₙ₊₁. Glycogen synthase is an α-retaining glucosyltransferase that uses ADP-glucose to incorporate additional glucose monomers onto the growing glycogen polymer. Essentially, GlgA catalyzes the final step of converting excess glucose residues one by one into a polymeric chain for storage as glycogen.

[0256] Classically, glycogen synthases, or α-1,4-glucan synthases, have been divided into two families, animal/fungal glycogen synthases and bacterial/plant starch synthases, according to differences in sequence, sugar donor specificity and regulatory mechanisms. However, detailed sequence analysis, predicted secondary structure comparisons, and threading analysis show that these two families are structurally related and that some domains of animal/fungal synthases were acquired to meet the particular regulatory requirements of those cell types.

[0257] Crystal structures have been established for certain bacterial glycogen synthases (see, e.g., Buschiazzo et al., The EMBO Journal 23, 3196-3205, 2004). These structures show that reported glycogen synthase folds into two Rossmann-fold domains organized as in glycogen phosphorlyase and other glycosyltransferases of the glycosyltransferases superfamily, with a deep fissure between both domains that includes the catalytic center. The core of the N-terminal domain of this glycogen synthase consists of a nine-stranded, predominantly parallel, central β-sheet flanked on both sides by seven α-helices. The C-terminal domain (residues 271-456) shows a similar fold with a six-stranded parallel β-sheet and nine α-helices. The last α-helix of this domain undergoes a kink at position 457-460, with the final 17 residues of the protein (461-477) crossing over to the N-terminal domain and continuing as α-helix, a typical feature of glycosyltransferase enzymes.

[0258] These structures also show that the overall fold and the active site architecture of glycogen synthase are remarkably similar to those of glycogen phosphorylase, the latter playing a central role in the mobilization of carbohydrate reserves, indicating a common catalytic mechanism and comparable substrate-binding properties. In contrast to glycogen phosphorylase, however, glycogen synthase has a much wider catalytic cleft, which is predicted to undergo an important interdomain ‘closure’ movement during the catalytic cycle.

[0259] Crystal structures have been established for certain GlgA enzymes (see, e.g., Jin et al., EMBO J 24:694-704, 2005, incorporated by reference). These studies show that the N-terminal catalytic domain of GlgA resembles a dinucleotide-binding Rossmann fold and the C-terminal domain adopts a left-handed parallel beta helix that is involved in cooperative allosteric regulation and a unique oligomerization. Also, communication between the regulator-binding sites and the active site involves several distinct regions of the enzyme, including the N-terminus, the glucose-1-phosphate-binding site, and the ATP-binding site.

[0260] The glgA gene is expressed in a wide variety of cells, including animal, plant, fungal, and bacterial cells, including most, if not all, Cyanobacteria. The glgA gene is also fairly conserved among Cyanobacteria, as can be appreciated upon comparison of SEQ ID NOs:35 (S. elongatus PCC7942), 36 (Synechocystis sp. PCC6803), 37 (Synechococcus sp. PCC 7002), 38 (Synechococcus sp. WH8102), 39 (Synechococcus sp. RCC 307), 40 (Trichodesmium erythraeum IMS 101), 41 (Anabaena variabilis), and 42 (Nostoc sp. PCC 7120), which describe the polynucleotide sequences of various glgA genes from Cyanobacteria.

[0261] Glycogen Breakdown. In certain embodiments, a modified photosynthetic microorganism of the present invention expresses an increased amount of one or more polypeptides associated with a glycogen breakdown pathway. In particular embodiments, said one or more polypeptides include glycogen phosphorylase (GlgP), glycogen isoamylase (GlgX), glucanotransferase (MalQ), phosphoglucomutase (Pgm), glucokinase (Glk), and/or phosphoglucose isomerase (Pgi), or a functional fragment or variant thereof, including, for example, those provided in SEQ ID NOs:68, 70, 72, 73, 83 or 85. Examples of additional Pgm polypeptide sequences useful according to the present invention are provided in SEQ ID NOs:74, 76, 77, 79, and 81. Pgm, Glk, and Pgi are bidirectional enzymes that can promote glycogen synthesis or breakdown depending on conditions.

[0262] (iv) Polypeptide Variants and Fragments

[0263] As noted above, embodiments of the present invention include variants and fragments of any of the reference polypeptides and polynucleotides described herein (see, e.g., the Sequence Listing). Variant polypeptides are biologically active, that is, they continue to possess the enzymatic activity of a reference polypeptide. Such variants may result from, for example, genetic polymorphism and/or from human manipulation.

[0264] Biologically active variants of a reference polypeptide will have at least 40%, 50%, 60%, 70%, generally at least 75%, 80%, 85%, usually about 90% to 95% or more, and typically about 97% or 98% or more sequence similarity or sequence identity to the amino acid sequence for a reference protein as determined by sequence alignment programs described elsewhere herein using default parameters. A biologically active variant of a reference polypeptide may differ from that protein generally by as much 200, 100, 50 or 20 amino acid residues or suitably by as few as 1-15 amino acid residues, as few as 1-10, such as 6-10 amino acid residues, including about 20, 19, 18, 17, 16, 15, 14, 13, 12, 11, 10, 9, 8, 7, 6, 5, 4, 3, 2, or even 1 amino acid residues. In some embodiments, a variant polypeptide differs from the reference sequences referred to herein (see, e.g., the Sequence Listing) by at least one but by less than 15, 10 or 5 amino acid residues. In other embodiments, it differs from the reference sequences by at least one residue but less than 20%, 15%, 10% or 5% of the residues.

[0265] A biologically active fragment can be a polypeptide fragment which is, for example, 10, 11, 12, 13, 14, 15, 16, 17, 18, 19, 20, 21, 22, 23, 24, 25, 26, 27, 28, 29, 30, 40, 50, 60, 70, 80, 90, 100, 110, 120, 130, 140, 150, 160, 170, 180, 190, 200, 220, 240, 260, 280, 300, 320, 340, 360, 380, 400, 450, 500, 600 or more contiguous amino acids, including all integers in between, of a reference polypeptide sequence.

[0266] A reference polypeptide may be altered in various ways including amino acid substitutions, deletions, truncations, and insertions. Methods for such manipulations are generally known in the art. For example, amino acid sequence variants of a reference polypeptide can be prepared by mutations in the DNA. Methods for mutagenesis and nucleotide sequence alterations are well known in the art. See, for example, Kunkel (PNAS USA. 82: 488-492, 1985); Kunkel et al., (Methods in Enzymol. 154: 367-382, 1987), U.S. Pat. No. 4,873,192, Watson, J. D. et al., (“Molecular Biology of the Gene,” Fourth Edition, Benjamin/Cummings, Menlo Park, Calif., 1987) and the references cited therein. Guidance as to appropriate amino acid substitutions that do not affect biological activity of the protein of interest may be found in the model of Dayhoff et al., (1978) Atlas of Protein Sequence and Structure (Natl. Biomed. Res. Found., Washington, D.C.).

[0267] Methods for screening gene products of combinatorial libraries made by point mutations or truncation, and for screening cDNA libraries for gene products having a selected property are known in the art. Such methods are adaptable for rapid screening of the gene libraries generated by combinatorial mutagenesis of reference polypeptides. Recursive ensemble mutagenesis (REM), a technique which enhances the frequency of functional mutants in the libraries, can be used in combination with the screening assays to identify polypeptide variants (Arkin and Yourvan, PNAS USA 89: 7811-7815, 1992; Delgrave et al., Protein Engineering. 6: 327-331, 1993). Conservative substitutions, such as exchanging one amino acid with another having similar properties, may be desirable as discussed in more detail below.

[0268] Polypeptide variants may contain conservative amino acid substitutions at various locations along their sequence, as compared to a reference amino acid sequence. A “conservative amino acid substitution” is one in which the amino acid residue is replaced with an amino acid residue having a similar side chain. Families of amino acid residues having similar side chains have been defined in the art, which can be generally sub-classified as follows:

[0269] Acidic: The residue has a negative charge due to loss of H ion at physiological pH and the residue is attracted by aqueous solution so as to seek the surface positions in the conformation of a peptide in which it is contained when the peptide is in aqueous medium at physiological pH. Amino acids having an acidic side chain include glutamic acid and aspartic acid.

[0270] Basic: The residue has a positive charge due to association with H ion at physiological pH or within one or two pH units thereof (e.g., histidine) and the residue is attracted by aqueous solution so as to seek the surface positions in the conformation of a peptide in which it is contained when the peptide is in aqueous medium at physiological pH. Amino acids having a basic side chain include arginine, lysine and histidine.

[0271] Charged: The residues are charged at physiological pH and, therefore, include amino acids having acidic or basic side chains (i.e., glutamic acid, aspartic acid, arginine, lysine and histidine).

[0272] Hydrophobic: The residues are not charged at physiological pH and the residue is repelled by aqueous solution so as to seek the inner positions in the conformation of a peptide in which it is contained when the peptide is in aqueous medium. Amino acids having a hydrophobic side chain include tyrosine, valine, isoleucine, leucine, methionine, phenylalanine and tryptophan.

[0273] Neutral/polar: The residues are not charged at physiological pH, but the residue is not sufficiently repelled by aqueous solutions so that it would seek inner positions in the conformation of a peptide in which it is contained when the peptide is in aqueous medium. Amino acids having a neutral/polar side chain include asparagine, glutamine, cysteine, histidine, serine and threonine.

[0274] This description also characterizes certain amino acids as “small” since their side chains are not sufficiently large, even if polar groups are lacking, to confer hydrophobicity. With the exception of proline, “small” amino acids are those with four carbons or less when at least one polar group is on the side chain and three carbons or less when not. Amino acids having a small side chain include glycine, serine, alanine and threonine. The gene-encoded secondary amino acid proline is a special case due to its known effects on the secondary conformation of peptide chains. The structure of proline differs from all the other naturally-occurring amino acids in that its side chain is bonded to the nitrogen of the α-amino group, as well as the α-carbon. Several amino acid similarity matrices (e.g., PAM120 matrix and PAM250 matrix as disclosed for example by Dayhoff et al., (1978), A model of evolutionary change in proteins. Matrices for determining distance relationships In M. O. Dayhoff, (ed.), Atlas of protein sequence and structure, Vol. 5, pp. 345-358, National Biomedical Research Foundation, Washington D.C.; and by Gonnet et al., (Science. 256: 14430-1445, 1992), however, include proline in the same group as glycine, serine, alanine and threonine. Accordingly, for the purposes of the present invention, proline is classified as a “small” amino acid.

[0275] The degree of attraction or repulsion required for classification as polar or nonpolar is arbitrary and, therefore, amino acids specifically contemplated by the invention have been classified as one or the other. Most amino acids not specifically named can be classified on the basis of known behaviour.

[0276] Amino acid residues can be further sub-classified as cyclic or non-cyclic, and aromatic or non-aromatic, self-explanatory classifications with respect to the side-chain substituent groups of the residues, and as small or large. The residue is considered small if it contains a total of four carbon atoms or less, inclusive of the carboxyl carbon, provided an additional polar substituent is present; three or less if not. Small residues are, of course, always non-aromatic. Dependent on their structural properties, amino acid residues may fall in two or more classes. For the naturally-occurring protein amino acids, sub-classification according to this scheme is presented in Table A.

TABLE A
Amino acid sub-classification

| Sub-classes | Amino acids |
|---|---|
| Acidic | Aspartic acid, Glutamic acid |
| Basic | Noncyclic: Arginine, Lysine; Cyclic: Histidine |
| Charged | Aspartic acid, Glutamic acid, Arginine, Lysine, |
| | Histidine |
| Small | Glycine, Serine, Alanine, Threonine, Proline |
| Polar/neutral | Asparagine, Histidine, Glutamine, Cysteine, Serine, |
| | Threonine |
| Polar/large | Asparagine, Glutamine |
| Hydrophobic | Tyrosine, Valine, Isoleucine, Leucine, Methionine, |
| | Phenylalanine, Tryptophan |
| Aromatic | Tryptophan, Tyrosine, Phenylalanine, |
| Residues that | Glycine and Proline |
| influence chain | |
| orientation | |

[0277] Conservative amino acid substitution also includes groupings based on side chains. For example, a group of amino acids having aliphatic side chains is glycine, alanine, valine, leucine, and isoleucine; a group of amino acids having aliphatic-hydroxyl side chains is serine and threonine; a group of amino acids having amide-containing side chains is asparagine and glutamine; a group of amino acids having aromatic side chains is phenylalanine, tyrosine, and tryptophan; a group of amino acids having basic side chains is lysine, arginine, and histidine; and a group of amino acids having sulphur-containing side chains is cysteine and methionine. For example, it is reasonable to expect that replacement of a leucine with an isoleucine or valine, an aspartate with a glutamate, a threonine with a serine, or a similar replacement of an amino acid with a structurally related amino acid will not have a major effect on the properties of the resulting variant polypeptide. Whether an amino acid change results in a functional truncated and/or variant polypeptide can readily be determined by assaying its enzymatic activity, as described herein. Conservative substitutions are shown in Table B under the heading of exemplary substitutions. Amino acid substitutions falling within the scope of the invention, are, in general, accomplished by selecting substitutions that do not differ significantly in their effect on maintaining (a) the structure of the peptide backbone in the area of the substitution, (b) the charge or hydrophobicity of the molecule at the target site, or (c) the bulk of the side chain. After the substitutions are introduced, the variants are screened for biological activity.

TABLE B
Exemplary Amino Acid Substitutions

| | | Preferred |
|---|---|---|
| Original Residue | Exemplary Substitutions | Substitutions |
| Ala | Val, Leu, Ile | Val |
| Arg | Lys, Gln, Asn | Lys |
| Asn | Gln, His, Lys, Arg | Gln |
| Asp | Glu | Glu |
| Cys | Ser | Ser |
| Gln | Asn, His, Lys, | Asn |
| Glu | Asp, Lys | Asp |
| Gly | Pro | Pro |
| His | Asn, Gln, Lys, Arg | Arg |
| Ile | Leu, Val, Met, Ala, Phe, Norleu | Leu |
| Leu | Norleu, Ile, Val, Met, Ala, Phe | Ile |
| Lys | Arg, Gln, Asn | Arg |
| Met | Leu, Ile, Phe | Leu |
| Phe | Leu, Val, Ile, Ala | Leu |
| Pro | Gly | Gly |
| Ser | Thr | Thr |
| Thr | Ser | Ser |
| Trp | Tyr | Tyr |
| Tyr | Tip, Phe, Thr, Ser | Phe |
| Val | Ile, Leu, Met, Phe, Ala, Norleu | Leu |

[0278] Alternatively, similar amino acids for making conservative substitutions can be grouped into three categories based on the identity of the side chains. The first group includes glutamic acid, aspartic acid, arginine, lysine, histidine, which all have charged side chains; the second group includes glycine, serine, threonine, cysteine, tyrosine, glutamine, asparagine; and the third group includes leucine, isoleucine, valine, alanine, proline, phenylalanine, tryptophan, methionine, as described in Zubay, G., Biochemistry, third edition, Wm.C. Brown Publishers (1993).

[0279] Thus, a predicted non-essential amino acid residue in reference polypeptide is typically replaced with another amino acid residue from the same side chain family. Alternatively, mutations can be introduced randomly along all or part of a coding sequence, such as by saturation mutagenesis, and the resultant mutants can be screened for an activity of the parent polypeptide to identify mutants which retain that activity. Following mutagenesis of the coding sequences, the encoded peptide can be expressed recombinantly and the activity of the peptide can be determined. A “non-essential” amino acid residue is a residue that can be altered from the wild-type sequence of an embodiment polypeptide without abolishing or substantially altering one or more of its activities. Suitably, the alteration does not substantially abolish one of these activities, for example, the activity is at least 20%, 40%, 60%, 70% or 80% 100%, 500%, 1000% or more of wild-type. An “essential” amino acid residue is a residue that, when altered from the wild-type sequence of a reference polypeptide, results in abolition of an activity of the parent molecule such that less than 20% of the wild-type activity is present. For example, such essential amino acid residues may include those that are conserved in reference polypeptides across different species, including those sequences that are conserved in the enzymatic sites of reference polypeptides from various sources.

[0280] Accordingly, the present invention also contemplates variants of the naturally-occurring reference polypeptide sequences or their biologically-active fragments, wherein the variants are distinguished from the naturally-occurring sequence by the addition, deletion, or substitution of one or more amino acid residues. In general, as noted above, variants will display at least about 30, 40, 50, 55, 60, 65, 70, 75, 80, 85, 90, 91, 92, 93, 94, 95, 96, 97, 98, 99% similarity or sequence identity to a reference polypeptide sequence. Moreover, sequences differing from the native or parent sequences by the addition, deletion, or substitution of 1, 2, 3, 4, 5, 6, 7, 8, 9, 10, 11, 12, 13, 14, 15, 16, 17, 18, 19, 20, 30, 40, 50, 60, 70, 80, 90, 100 or more amino acids but which retain the properties or activities of a parent or reference polypeptide sequence are contemplated.

[0281] In some embodiments, variant polypeptides differ from reference sequence by at least one but by less than 50, 40, 30, 20, 15, 10, 8, 6, 5, 4, 3 or 2 amino acid residue(s). In other embodiments, variant polypeptides differ from a reference sequence by at least 1% but less than 20%, 15%, 10% or 5% of the residues. (If this comparison requires alignment, the sequences should be aligned for maximum similarity. “Looped” out sequences from deletions or insertions, or mismatches, are considered differences.)

[0282] Calculations of sequence similarity or sequence identity between sequences (the terms are used interchangeably herein) are performed as follows. To determine the percent identity of two amino acid sequences, or of two nucleic acid sequences, the sequences are aligned for optimal comparison purposes (e.g., gaps can be introduced in one or both of a first and a second amino acid or nucleic acid sequence for optimal alignment and non-homologous sequences can be disregarded for comparison purposes). In certain embodiments, the length of a reference sequence aligned for comparison purposes is at least 30%, preferably at least 40%, more preferably at least 50%, 60%, and even more preferably at least 70%, 80%, 90%, 100% of the length of the reference sequence. The amino acid residues or nucleotides at corresponding amino acid positions or nucleotide positions are then compared. When a position in the first sequence is occupied by the same amino acid residue or nucleotide as the corresponding position in the second sequence, then the molecules are identical at that position.

[0283] The percent identity between the two sequences is a function of the number of identical positions shared by the sequences, taking into account the number of gaps, and the length of each gap, which need to be introduced for optimal alignment of the two sequences.

[0284] The comparison of sequences and determination of percent identity between two sequences can be accomplished using a mathematical algorithm. In a preferred embodiment, the percent identity between two amino acid sequences is determined using the Needleman and Wunsch, (J. Mol. Biol. 48: 444-453, 1970) algorithm which has been incorporated into the GAP program in the GCG software package, using either a Blossum 62 matrix or a PAM250 matrix, and a gap weight of 16, 14, 12, 10, 8, 6, or 4 and a length weight of 1, 2, 3, 4, 5, or 6. In yet another preferred embodiment, the percent identity between two nucleotide sequences is determined using the GAP program in the GCG software package, using a NWSgapdna.CMP matrix and a gap weight of 40, 50, 60, 70, or 80 and a length weight of 1, 2, 3, 4, 5, or 6. A particularly preferred set of parameters (and the one that should be used unless otherwise specified) are a Blossum 62 scoring matrix with a gap penalty of 12, a gap extend penalty of 4, and a frameshift gap penalty of 5.

[0285] The percent identity between two amino acid or nucleotide sequences can be determined using the algorithm of E. Meyers and W. Miller (Cabios. 4:11-17, 1989) which has been incorporated into the ALIGN program (version 2.0), using a PAM120 weight residue table, a gap length penalty of 12 and a gap penalty of 4.

[0286] The nucleic acid and protein sequences described herein can be used as a “query sequence” to perform a search against public databases to, for example, identify other family members or related sequences. Such searches can be performed using the NBLAST and XBLAST programs (version 2.0) of Altschul, et al., (1990, J. Mol. Biol, 215: 403-10). BLAST nucleotide searches can be performed with the NBLAST program, score=100, wordlength=12 to obtain nucleotide sequences homologous to nucleic acid molecules of the invention. BLAST protein searches can be performed with the XBLAST program, score=50, wordlength=3 to obtain amino acid sequences homologous to protein molecules of the invention. To obtain gapped alignments for comparison purposes, Gapped BLAST can be utilized as described in Altschul et al., (Nucleic Acids Res. 25: 3389-3402, 1997). When utilizing BLAST and Gapped BLAST programs, the default parameters of the respective programs (e.g., XBLAST and NBLAST) can be used.

[0287] In one embodiment, as noted above, polynucleotides and/or polypeptides can be evaluated using a BLAST alignment tool. A local alignment consists simply of a pair of sequence segments, one from each of the sequences being compared. A modification of Smith-Waterman or Sellers algorithms will find all segment pairs whose scores cannot be improved by extension or trimming, called high-scoring segment pairs (HSPs). The results of the BLAST alignments include statistical measures to indicate the likelihood that the BLAST score can be expected from chance alone.

[0288] The raw score, S, is calculated from the number of gaps and substitutions associated with each aligned sequence wherein higher similarity scores indicate a more significant alignment. Substitution scores are given by a look-up table (see PAM, BLOSUM).

[0289] Gap scores are typically calculated as the sum of G, the gap opening penalty and L, the gap extension penalty. For a gap of length n, the gap cost would be G+Ln. The choice of gap costs, G and L is empirical, but it is customary to choose a high value for G (10-15), e.g., 11, and a low value for L (1-2) e.g., 1.

[0290] The bit score, S′, is derived from the raw alignment score S in which the statistical properties of the scoring system used have been taken into account. Bit scores are normalized with respect to the scoring system, therefore they can be used to compare alignment scores from different searches. The terms “bit score” and “similarity score” are used interchangeably. The bit score gives an indication of how good the alignment is; the higher the score, the better the alignment.

[0291] The E-Value, or expected value, describes the likelihood that a sequence with a similar score will occur in the database by chance. It is a prediction of the number of different alignments with scores equivalent to or better than S that are expected to occur in a database search by chance. The smaller the E-Value, the more significant the alignment. For example, an alignment having an E value of e⁻¹¹⁷ means that a sequence with a similar score is very unlikely to occur simply by chance. Additionally, the expected score for aligning a random pair of amino acids is required to be negative, otherwise long alignments would tend to have high score independently of whether the segments aligned were related. Additionally, the BLAST algorithm uses an appropriate substitution matrix, nucleotide or amino acid and for gapped alignments uses gap creation and extension penalties. For example, BLAST alignment and comparison of polypeptide sequences are typically done using the BLOSUM62 matrix, a gap existence penalty of 11 and a gap extension penalty of 1.

[0292] In one embodiment, sequence similarity scores are reported from BLAST analyses done using the BLOSUM62 matrix, a gap existence penalty of 11 and a gap extension penalty of 1.

[0293] In a particular embodiment, sequence identity/similarity scores provided herein refer to the value obtained using GAP Version 10 (GCG, Accelrys, San Diego, Calif.) using the following parameters: % identity and % similarity for a nucleotide sequence using GAP Weight of 50 and Length Weight of 3, and the nwsgapdna.cmp scoring matrix; % identity and % similarity for an amino acid sequence using GAP Weight of 8 and Length Weight of 2, and the BLOSUM62 scoring matrix (Henikoff and Henikoff, PNAS USA. 89:10915-10919, 1992). GAP uses the algorithm of Needleman and Wunsch (J Mol Biol. 48:443-453, 1970) to find the alignment of two complete sequences that maximizes the number of matches and minimizes the number of gaps.

[0294] In one particular embodiment, the variant polypeptide comprises an amino acid sequence that can be optimally aligned with a reference polypeptide sequence (see, e.g., Sequence Listing) to generate a BLAST bit scores or sequence similarity scores of at least about 50, 60, 70, 80, 90, 100, 100, 110, 120, 130, 140, 150, 160, 170, 180, 190, 200, 210, 220, 230, 240, 250, 260, 270, 280, 290, 300, 310, 320, 330, 340, 350, 360, 370, 380, 390, 400, 410, 420, 430, 440, 450, 460, 470, 480, 490, 500, 510, 520, 530, 540, 550, 560, 570, 580, 590, 600, 610, 620, 630, 640, 650, 660, 670, 680, 690, 700, 710, 720, 730, 740, 750, 760, 770, 780, 790, 800, 810, 820, 830, 840, 850, 860, 870, 880, 890, 900, 910, 920, 930, 940, 950, 960, 970, 980, 990, 1000, or more, including all integers and ranges in between, wherein the BLAST alignment used the BLOSUM62 matrix, a gap existence penalty of 11, and a gap extension penalty of 1.

[0295] Variants of a reference polypeptide can be identified by screening combinatorial libraries of mutants of a reference polypeptide. Libraries or fragments e.g., N terminal, C terminal, or internal fragments, of protein coding sequence can be used to generate a variegated population of fragments for screening and subsequent selection of variants of a reference polypeptide.

[0296] Methods for screening gene products of combinatorial libraries made by point mutation or truncation, and for screening cDNA libraries for gene products having a selected property are known in the art. Such methods are adaptable for rapid screening of the gene libraries generated by combinatorial mutagenesis of polypeptides.

[0297] The present invention also contemplates the use of chimeric or fusion proteins of the reference polypeptides described herein. As used herein, a “chimeric protein” or “fusion protein” includes a reference polypeptide, or a polypeptide fragment linked to either another reference polypeptide (e.g., to create multiple fragments), to a non-reference polypeptide, or to both. In certain embodiments, a reference polypeptide can be fused to a heterologous polypeptide sequence. A “heterologous polypeptide” typically has an amino acid sequence corresponding to a protein which is different from the reference protein sequence, and which can be derived from the same or a different organism. The reference polypeptide of the fusion protein can correspond to all or a portion of a biologically active amino acid sequence.

[0298] In certain embodiments, a fusion protein includes at least one or two biologically active portions of reference protein. The polypeptides forming the fusion protein are typically linked C-terminus to N-terminus, although they can also be linked C-terminus to C-terminus, N-terminus to N-terminus, or N-terminus to C-terminus. The polypeptides of the fusion protein can be in any order.

[0299] The fusion partner may be designed and included for essentially any desired purpose provided they do not adversely affect the enzymatic activity of the polypeptide. For example, in one embodiment, a fusion partner may comprise a sequence that assists in expressing the protein (an expression enhancer) at higher yields than the native recombinant protein. Other fusion partners may be selected so as to increase the solubility or stability of the protein or to enable the protein to be targeted to desired intracellular compartments.

[0300] The fusion protein can include a moiety which has a high affinity for a ligand. For example, the fusion protein can be a GST-fusion protein in which the reference polypeptide sequences are fused to the C-terminus of the GST sequences. Such fusion proteins can facilitate the purification and/or identification of the resulting polypeptide. Alternatively, the fusion protein can be reference polypeptide containing a heterologous signal sequence at its N-terminus. In certain host cells, expression and/or secretion of such proteins can be increased through use of a heterologous signal sequence.

[0301] Fusion proteins may generally be prepared using standard techniques, described elsewhere herein. A peptide linker sequence may be employed to separate the first and second polypeptide components by a distance sufficient to ensure that each polypeptide folds into its secondary and tertiary structures, if desired. Exemplary peptide linkers are described elsewhere herein.

### C. POLYNUCLEOTIDES AND VECTORS

[0302] Embodiments of the present invention include polynucleotides encoding a diacylglyceroltransferase (DGAT) fusion protein described herein, the fusion protein comprising at least one DGAT polypeptide fused to at least one intracellular localization domain, such as a bacteria membrane- or bacterial plasma membrane (PM)-targeting domain. Such polynucleotides can be partially or fully isolated from other cellular components, within a vector, for example, a composition comprising such a vector (e.g., in a tube or kit), or in a host cell, such as modified photosynthetic microorganism.

[0303] These polynucleotides and modified photosynthetic microorganisms comprising the same may optionally comprise one or more (introduced) polynucleotides encoding a lipid biosynthesis protein, and/or one or more (introduced) polynucleotides encoding a polypeptide associated with glycogen breakdown.

[0304] Also included are nucleotide sequences that encode any functional naturally-occurring variants or fragments (e.g., allelic variants, orthologs, splice variants) or non-naturally occurring variants or fragments of these native polynucleotides (i.e., optimized by engineering), as well as compositions comprising such polynucleotides, including, for example, cloning and expression vectors.

[0305] Also, the modified photosynthetic microorganisms described herein may optionally comprise a mutation or deletion in one or more genes associated with glycogen biosynthesis or storage, alone or in combination with the presence of overexpressed proteins associated with lipid biosynthesis proteins and/or glycogen breakdown. Certain modified photosynthetic microorganisms, for example, for the production of wax esters, may optionally comprise a mutation or deletion in or more genes encoding an aldehyde decarbonylase, an aldehyde dehydrogenase, or both, either alone or in combination with the presence of overexpressed proteins associated with lipid biosynthesis proteins and/or glycogen breakdown.

[0306] The recitations “mutation” or “deletion,” in this context refer generally to those changes or alterations in a photosynthetic microorganism, e.g., a Cyanobacterium, that render the product of that gene non-functional or having reduced function. Examples of such changes or alterations include nucleotide substitutions, deletions, or additions/insertions to the coding or regulatory sequences of a targeted gene (e.g., glgA, glgC, pgm, aldehyde decarbonylase, aldehyde dehydrogenase), in whole or in part, which disrupt, eliminate, down-regulate, or significantly reduce the expression of the polypeptide encoded by that gene, whether at the level of transcription, translation, post-translational modification, or protein stability. Such alterations can also reduce the enzymatic activity or other functional characteristic of the protein (e.g., localization), with or without reducing expression.

[0307] Techniques for producing such alterations or changes, such as by recombination with a vector having a selectable marker, are exemplified herein and known in the molecular biological art. In particular embodiments, one or more alleles of a gene, e.g., two or all alleles, may be mutated or deleted within a photosynthetic microorganism. In particular embodiments, modified photosynthetic microorganisms, e.g., Cyanobacteria, of the present invention are merodiploids or partial diploids.

[0308] The “deletion” of a targeted gene or polypeptide may also be accomplished by targeting the mRNA of that gene, such as by using various antisense technologies (e.g., antisense oligonucleotides and siRNA) known in the art. Accordingly, targeted genes may be considered “non-functional” when the polypeptide or enzyme encoded by that gene is not expressed by the modified photosynthetic microorganism, or is expressed in negligible amounts.

[0309] As used herein, the terms “DNA” and “polynucleotide” and “nucleic acid” include a DNA molecule that has been isolated free of total genomic DNA of a particular species. Therefore, a DNA segment encoding a polypeptide refers to a DNA segment that contains one or more coding sequences yet is substantially isolated away from, or purified free from, total genomic DNA of the species from which the DNA segment is obtained. Included within the terms “DNA segment” and “polynucleotide” are DNA segments and smaller fragments of such segments, and also recombinant vectors, including, for example, plasmids, cosmids, phagemids, phage, viruses, and the like.

[0310] As will be understood by those skilled in the art, the polynucleotide sequences of this invention can include genomic sequences, extra-genomic and plasmid-encoded sequences and smaller engineered gene segments that express, or may be adapted to express, proteins, polypeptides, peptides and the like. Such segments may be naturally isolated, or modified synthetically by the hand of man.

[0311] Polynucleotides may be single-stranded (coding or antisense) or double-stranded, and may be DNA (genomic, cDNA or synthetic) or RNA molecules. Additional coding or non-coding sequences may, but need not, be present within a polynucleotide of the present invention, and a polynucleotide may, but need not, be linked to other molecules and/or support materials.

[0312] Polynucleotides may comprise a native sequence (e.g., an endogenous sequence that encodes protein described herein) or may comprise a variant or fragment, or a biological functional equivalent of such a sequence. Polynucleotide variants may contain one or more substitutions, additions, deletions and/or insertions, as further described herein, preferably such that the enzymatic activity of the encoded polypeptide is not substantially diminished relative to the unmodified or reference polypeptide. The effect on the enzymatic activity of the encoded polypeptide may generally be assessed as described herein and known in the art.

[0313] (i) Intracellular Localization Domain-DGAT Fusion Polynucleotides

[0314] Embodiments of the present invention include polynucleotides (e.g., isolated polynucleotides) that encode any of the intracellular localization domain-DGAT fusion proteins described herein, such as the membrane-targeting domain-DGAT fusion proteins. These polynucleotides comprise at least one sequence encoding a heterologous intracellular localization domain described herein, which is fused in-frame to at least one sequence encoding a DGAT polypeptide, or an active fragment or variant thereof.

[0315] Certain embodiments thus include polynucleotides that encode any one or more of the intracellular localization domains described herein, where such polynucleotide(s) are fused in-frame to a DGAT-encoding polynucleotide. Exemplary sequences that encode a membrane-targeting domain can be found within SEQ ID NOs:200 or 202, the respective PCC7942-0858 and PCC7942-1015 coding sequences of two methyl-accepting chemotaxis (MCP) proteins from S. elongatus. For instance, in specific embodiments, the polynucleotide sequence may include about the N-terminal 129 nucleotides of SEQ ID NO:200 (PCC7942-0858), SEQ ID NO: 213, which encodes the N-terminal signal sequence of the PCC7942-0858 gene; additional sequences can also be included, for instance, about the N-terminal 132, 135, 138, 141, 144, 147, 150, 153, 156, 159, 162, 165, 168, 171, 174, 177, 180 or more nucleotides of SEQ ID NO:200 (PCC7942-0858).

[0316] Also included are polynucleotides that encode any one or more of the DGAT polypeptides described herein, where such polynucleotide(s) are fused in-frame to a heterologous intracellular localization domain-encoding polynucleotide. In specific embodiments, a DGAT-encoding portion of the fusion protein encodes a DGAT comprising or consisting of a polypeptide sequence set forth in any one of SEQ ID NOs:58, 59, 60 or 61, or a fragment or variant thereof. SEQ ID NO:58 is the sequence of DGATn; SEQ ID NO: 59 is the sequence of Streptomyces coelicolor DGAT (ScoDGAT or SDGAT); SEQ ID NO:60 is the sequence of Alcanivorax borkumensis DGAT (AboDGAT); and SEQ ID NO:61 is the sequence of DGATd (Acinetobacter baylii sp.).

[0317] In certain embodiments, a DGAT-encoding portion of the fusion protein comprises or consists of a polynucleotide sequence set forth in any one of SEQ ID NOs:62, 63, 64, 65 or 66, or a fragment or variant thereof. SEQ ID NO:62 is a codon-optimized for expression in Cyanobacteria sequence that encodes DGATn; SEQ ID NO:63 has homology to SEQ ID NO:62; SEQ ID NO:64 is a codon-optimized for expression in Cyanobacteria sequence that encodes ScoDGAT; SEQ ID NO:65 is a codon-optimized for expression in Cyanobacteria sequence that encodes AboDGAT; and SEQ ID NO:66 is a codon-optimized for expression in Cyanobacteria sequence that encodes DGATd. DGATn and DGATd correspond to Acinetobacter baylii DGAT and a modified form thereof, which includes two additional amino acid residues immediately following the initiator methionine.

[0318] (ii) Lipid Biosynthesis Genes

[0319] In certain embodiments, a modified photosynthetic microorganism comprises an introduced polynucleotide that encodes one or more lipid biosynthesis proteins. In some instances, a modified photosynthetic microorganism comprises an endogenous polynucleotide that encodes a lipid biosynthesis gene, where a regulatory element such as a promoter is introduced upstream of that polynucleotide to regulate or alter expression of the encoded protein.

[0320] In particular embodiments, a modified photosynthetic microorganism comprises reduced or eliminated expression or activity of a lipid biosynthesis polypeptide. Included are full or partial deletions, and point mutations or insertions of an endogenous lipid biosynthesis gene that reduce or eliminate expression and/or activity of the encoded polypeptide.

[0321] Exemplary lipid biosynthesis genes encode polypeptides such as acyl carrier proteins (ACP), acyl ACP synthases (Aas), acyl-ACP reductases, alcohol dehydrogenases, aldehyde dehydrogenases, aldehyde decarbonylases, thioesterases (TES), acetyl coenzyme A carboxylases (ACCase), phosphatidic acid phosphatases (PAP; or phosphatidate phosphatases), triacylglycerol (TAG) hydrolases, fatty acyl-CoA synthetases, and lipases/phospholipases, as described herein.

[0322] Acyl Carrier Proteins. In certain embodiments, a modified photosynthetic microorganism comprises one or more polynucleotides encoding one or more acyl carrier proteins (ACP). Exemplary ACP nucleotide sequences include SEQ ID NO:5 from Synechococcus elongatus PCC7942, SEQ ID NOS:7, 9, and 11 from Acinetobacter sp. ADP1, and SEQ ID NO:13 from Spinacia oleracea.

[0323] Acyl ACP Synthases (Aas). In certain embodiments, a modified photosynthetic microorganism comprises one or more polynucleotides encoding one or more acyl-ACP synthetase (Aas) enzymes. In certain embodiments, the Aas nucleotide sequence is derived from the Se918 gene of Synechococcus elongatus. One exemplary Aas sequence nucleotide sequence is SEQ ID NO:43 from Synechococcus elongatus PCC 7942.

[0324] In particular embodiments, a modified photosynthetic microorganism of the present invention has a mutation such as a point mutation, insertion, or full or partial deletion of one or more endogenous Aas genes, for instance, the Se918 gene of S. elongatus PCC7942, to reduce or eliminate expression and/or activity of the encoded Aas polypeptide.

[0325] Acyl-ACP Reductases. In certain embodiments, a modified photosynthetic microorganism comprises one or more polynucleotides encoding one or more acyl-ACP reductase polypeptides. Exemplary acyl-ACP reductase nucleotide sequences include orf1594 from Synechococcus elongatus PCC7942 (SEQ ID NO:1), and orfsll0209 from Synechocystis sp. PCC6803 (SEQ ID NO:3).

[0326] Alcohol Dehydrogenases. Certain embodiments may employ one or more alcohol dehydrogenase encoding polynucleotide sequences. Exemplary alcohol dehydrogenases include slr1192 of Synechocystis sp. PCC6803 (SEQ ID NO:104) and ACIAD3612 from Acinetobacter baylii (SEQ ID NO:106).

[0327] Aldehyde Dehydrogenases. Certain embodiments may employ one or more aldehyde dehydrogenase encoding polynucleotide sequences. Certain embodiments, for example, for the production of triglycerides or wax esters, may comprise mutations such as point mutations, insertions, or full or partial deletions of one or more endogenous aldehyde dehydrogenase genes. One exemplary aldehyde dehydrogenase is orf0489 of Synechococcus elongatus PCC7942 (SEQ ID NO:102).

[0328] Aldehyde Decarbonylases. Certain embodiments, for example, for the production of triglycerides or wax esters, may comprise mutations such as point mutations, insertions, or full or partial deletions of one or more endogenous aldehyde decarbonylase genes. One example of an aldehyde decarbonylase is encoded by orf1593 in S. elongatus PCC7942. Another example is an aldehyde decarbonylase encoded by orfsll0208 in Synechocystis sp. PCC6803.

[0329] Thioesterases (TES). In certain embodiments, a modified photosynthetic microorganism comprises one or more polynucleotides encoding one or more thioesterases (TES) including acyl-ACP thioesterases and/or acyl-CoA thioesterases. In certain embodiments, the polynucleotide sequence of the TES encodes a TesA or TesB polypeptide from E. coli, or a cytoplasmic TesA variant (*TesA) having the sequence set forth in SEQ ID NO:121.

[0330] In certain embodiments, the polynucleotide sequence of the TES comprises that of the FatB gene, encoding a FatB enzyme, such as a C8, C12, C14, C16, or C18 FatB enzyme. In certain embodiments, the polynucleotide encodes a thioesterase (e.g., FatB thioesterase), having only thioesterase activity and little or no lysophospholipase activity. In specific embodiments, the thioesterase is a FatB acyl-ACP thioesterase, which can hydrolyze acyl-ACP but not acyl-CoA. SEQ ID NO:197 is an exemplary nucleotide sequence of a C8/C10 FatB2 thioesterase derived from Cuphea hookeriana, and SEQ ID NO:122 is codon-optimized for expression in Cyanobacteria. SEQ ID NO:123 is an exemplary nucleotide sequence of a C12 FatB1 acyl-ACP thioesterase derived from Umbellularia californica, and SEQ ID NO:124 is a codon-optimized version of SEQ ID NO:123 for optimal expression in Cyanobacteria. SEQ ID NO:126 is an exemplary nucleotide sequence of a C14 FatB1 thioesterase derived from Cinnamomum camphora, and SEQ:125 is a codon-optimized version of SEQ ID NO:126. SEQ ID NO:127 is an exemplary nucleotide sequence of a C16 FatB 1 thioesterase derived from Cuphea hookeriana, and SEQ ID NO:128 is a codon-optimized version of SEQ ID NO:127. In certain embodiments, one or more FatB sequences are operably linked to a strong promoter, such as a Ptrc promoter. In other embodiments, one or more FatB sequences are operably linked to a relatively weak promoter, such as an arabinose promoter.

[0331] Acetyl Coenzyme A carboxylases (ACCase). In certain embodiments, a polynucleotide encodes an acetyl-CoA carboxylase (ACCase) comprising or consisting of a polypeptide sequence set forth in any of SEQ ID NOs:55, 45, 46, 47, 48 or 49, or a fragment or variant thereof. In particular embodiments, a ACCase polynucleotide comprises or consists of a polynucleotide sequence set forth in any of SEQ ID NOs:56, 57, 50, 51, 52, 53 or 54, or a fragment or variant thereof. SEQ ID NO:55 is the sequence of Saccharomyces cerevisiae acetyl-CoA carboxylase (yAcc1); and SEQ ID NO:56 is a codon-optimized for expression in Cyanobacteria sequence that encodes yAcc1. SEQ ID NO:45 is Synechococcus sp. PCC 7002 AccA; SEQ ID NO:46 is Synechococcus sp. PCC 7002 AccB; SEQ ID NO:47 is Synechococcus sp. PCC 7002 AccC; and SEQ ID NO:48 is Synechococcus sp. PCC 7002 AccD. SEQ ID NO:50 encodes Synechococcus sp. PCC 7002 AccA; SEQ ID NO:51 encodes Synechococcus sp. PCC 7002 AccB; SEQ ID NO:52 encodes Synechococcus sp. PCC 7002 AccC; and SEQ ID NO:53 encodes Synechococcus sp. PCC 7002 AccD. SEQ ID NO:49 is a Triticum aestivum ACCase; and SEQ ID NO:54 encodes this Triticum aestivum ACCase.

[0332] Phosphatidic Acid Phosphatases (PAP). In certain embodiments, a polynucleotide encodes a phosphatidate phosphatase (also referred to as a phosphatidic acid phosphatase; PAP) comprising or consisting of a polypeptide sequence set forth in SEQ ID NO:131, or a fragment or variant thereof. In particular embodiments, a phosphatidate phosphatase polynucleotide comprises or consists of a polynucleotide sequence set forth in SEQ ID NO:129 or SEQ ID NO:130, or a fragment or variant thereof. SEQ ID NO:131 is the sequence of Saccharomyces cerevisiae phosphatidate phosphatase (yPAH1), and SEQ ID NO:129 is a codon-optimized for expression in Cyanobacteria sequence that encodes yPAH1. In certain embodiments, the nucleotide sequence of the PAP is derived from the E. coli PgpB gene, and/or the PAP gene from Synechocystis sp. PCC6803.

[0333] Triacylglycerol (TAG) Hydrolases. Certain embodiments employ one or more TAG hydrolase encoding polynucleotide sequences. Non-limiting examples of TAG hydrolase polynucleotide sequences include SDP1 (SUGAR-DEPENDENT1) triacylglycerol lipase from Arabidopsis thaliana (SEQ ID NO:153), ACIAD1335 from Acinetobacter sp. ADP1 (SEQ ID NO:154), TG14P from S. cerevisiae (SEQ ID NO:175), and RHA1_ro04722 (YP_{—}704665) TAG lipase from Rhodococcus (SEQ ID NO:155). Additional polynucleotide sequences for exemplary lipases/esterases include RHA1_ro01602 lipase/esterase from Rhodococcus sp. (see SEQ ID NO:156), and the RHA1_ro06856 lipase/esterase (see SEQ ID NO:119) from Rhodococcus sp.

[0334] Fatty Acyl-CoA Synthetases. Certain embodiments employ one or more fatty acyl-CoA synthetase encoding polynucleotide sequences. One exemplary fatty acyl-CoA synthetase includes the FadD gene from E. coli (SEQ ID NO:16) which encodes a fatty acyl-CoA synthetase having substrate specificity for medium and long chain fatty acids. Other exemplary fatty acyl-CoA synthetases include those derived from S. cerevisiae; for example, the Faa1p coding sequence is set forth in SEQ ID NO:18, the Faa2p coding sequence is set forth in SEQ ID NO:20, and the Faa3p is set forth in SEQ ID NO:22. SEQ ID NO:22 is codon-optimized for expression in S. elongatus PCC7942.

[0335] Lipases/Phospholipases. In certain embodiments, a modified photosynthetic microorganism comprises one or more polynucleotides encoding one or more lipases or phospholipases, including lysophospholipases, or a fragment or variant thereof. In certain embodiments, the encoded lysophospholipase is Lysophospholipase L1 (TesA), Lysophospholipase L2, TesB, Vu Patatin 1 protein, or a homolog thereof.

[0336] In particular embodiments, the encoded phospholipase, e.g., a lysophospholipase, is a bacterial phospholipase, or a fragment or variant thereof, and the polynucleotide comprises a bacterial phospholipase polynucleotide sequence, e.g., a sequence derived from Escherichia coli, Enterococcus faecalis, or Lactobacillus plantarum. In particular embodiments, the encoded phospholipase is Lysophospholipase L1 (TesA), Lysophospholipase L2, TesB, Vu Patatin 1 protein, or a functional fragment thereof.

[0337] In certain embodiments, a lysophospholipase is a bacterial Lysophospholipase L1 (TesA) or TesB, such as an E. coli Lysophospholipase L1 encoded by a polynucleotide (pldC) having the wild-type sequence set forth in SEQ ID NO:196, or an E. coli TesB encoded by a polynucleotide having the wild-type sequence set forth in SEQ ID NO:132. The polypeptide sequence of E. coli Lysophospholipase L1 is provided in SEQ ID NO:133, and the polypeptide sequence of E. coli TesB is provided in SEQ ID NO:134. In other embodiments, a lysophospholipase is a Lysophospholipase L2, such as an E. coli Lysophospholipase L2 encoded by a polynucleotide (pldB) having the wild-type sequence set forth in SEQ ID NO:135, or a Vu patatin 1 protein encoded by a polynucleotide having the wild-type sequence set forth in SEQ ID NO:136. The polypeptide sequence of E. coli Lysophospholipase L2 is provided in SEQ ID NO:137, and the polypeptide sequence of Vu patatin 1 protein is provided in SEQ ID NO:138.

[0338] In particular embodiments, the polynucleotide encoding the phospholipase variant is modified such that it encodes a phospholipase that localizes predominantly to the cytoplasm instead of the periplasm. For example, it may encode a phospholipase having a deletion or mutation in a region associated with periplasmic localization. In particular embodiments, the encoded phospholipase variant is derived from Lysophospholipase L1 (TesA). In certain embodiments, the Lysophospholipase L1 (TesA) variant is a bacterial TesA, such as an E. coli Lysophospholipase (TesA) variant encoded by a polynucleotide having the sequence set forth in SEQ ID NO:139. The polypeptide sequence of the Lysophospholipase L1 variant is provided in SEQ ID NO:121 (PldC(*TesA)).

[0339] Additional examples of phospholipase-encoding polynucleotide sequences include phospholipase A1 (PldA) from Acinetobacter sp. ADP1 (SEQ ID NO:140), phospholipase A (PldA) from E. coli (SEQ ID NO:141), phospholipase from Streptomyces coelicolor A3(2) (SEQ ID NO:142), phospholipase A2 (PLA2-α) from Arabidopsis thaliana (SEQ ID NO:143). phospholipase A1/triacylglycerol lipase (DAD1; Defective Anther Dehiscence 1) from Arabidopsis thaliana (SEQ ID NO:144), chloroplast DONGLE from Arabidopsis thaliana (SEQ ID NO:145), patatin-like protein from Arabidopsis thaliana (SEQ ID NO:146), and patatin from Anabaena variabilis ATCC 29413 (SEQ ID NO:147). Additional non-limiting examples of lysophospholipase-encoding polynucleotide sequences include phospholipase B (Plb1p) from Saccharomyces cerevisiae S288c (SEQ ID NO:148), phospholipase B (Plb2p) from Saccharomyces cerevisiae S288c (SEQ ID NO:149), ACIAD1057 (TesA homolog) from Acinetobacter ADP1 (SEQ ID NO:150), ACIAD1943 lysophospholipase from Acinetobacter ADP1 (SEQ ID NO:151), and a lysophospholipase (YP_{—}702320; RHA1_ro02357) from Rhodococcus (SEQ ID NO:152).

[0340] (iii) Glycogen Biosynthesis, Storage, and Breakdown Genes

[0341] Glycogen Biosynthesis and Storage Genes. As noted above, certain embodiments include reduced or eliminated expression and/or activity of one or more polypeptides associated with glycogen biosynthesis and/or storage, for instance, by mutation of one or more genes that encode such polypeptides. Included are full or partial deletions, and point mutations or insertions of one or more glycogen biosynthesis/storage genes that reduce or eliminate expression and/or biological activity of the encoded protein(s). Exemplary genes associated with glycogen synthesis and/or storage include glgC, pgm, and glgA.

[0342] Examples of such glgC polynucleotide sequences are provided in SEQ ID NOs:28 (Synechocystis sp. PCC6803), 34 (Nostoc sp. PCC 7120), 33 (Anabaena variabilis), 32 (Trichodesmium erythraeum IMS 101), 27 (Synechococcus elongatus PCC7942), 30 (Synechococcus sp. WH8102), 31 (Synechococcus sp. RCC 307), and 29 (Synechococcus sp. PCC 7002), which respectively encode GlgC polypeptides having sequences set forth in SEQ ID NOs: 86, 87, 88, 89, 90, 91, 92, and 93.

[0343] Examples of such pgm polynucleotide sequences are provided in SEQ ID NOs: 25 (Synechocystis sp. PCC6803), 75 (Synechococcus elongatus PCC7942), 26 (Synechococcus sp. WH8102), 78 (Synechococcus RCC307), and 80 (Synechococcus 7002), which respectively encode Pgm polypeptides having sequences set forth in SEQ ID NOs:74, 76, 77, 79 and 81.

[0344] Examples of such glgA polynucleotide sequences are provided in SEQ ID NOs:36 (Synechocystis sp. PCC6803), 42 (Nostoc sp. PCC 7120), 41 (Anabaena variabilis), 40 (Trichodesmium erythraeum IMS 101), 35 (Synechococcus elongatus PCC7942), 38 (Synechococcus sp. WH8102), 39 (Synechococcus sp. RCC 307), and 37 (Synechococcus sp. PCC 7002), which respectively encode GlgA polypeptides having sequences set forth in SEQ ID NOs:94, 95, 96, 97, 98, 99, 100 and 101.

[0345] Glycogen Breakdown Genes. In certain embodiments, a modified photosynthetic microorganism comprise one or more polynucleotides encoding one or more polypeptides associated with a glycogen breakdown, or a fragment or variant thereof. In particular embodiments, the one or more polypeptides are glycogen phosphorylase (GlgP), glycogen isoamylase (GlgX), glucanotransferase (MalQ), phosphoglucomutase (Pgm), glucokinase (Glk), and/or phosphoglucose isomerase (Pgi), or a functional fragment or variant thereof.

[0346] A representative glgP polynucleotide sequence is provided in SEQ ID NO:67, and a representative GlgP polypeptide sequence is provided in SEQ ID NO:68. A representative glgX polynucleotide sequence is provided in SEQ ID NO:69, and a representative GlgX polypeptide sequence is provided in SEQ ID NO:70. A representative malQ polynucleotide sequence is provided in SEQ ID NO:71, and a representative MalQ polypeptide sequence is provide in SEQ ID NO:72. A representative phosphoglucomutase (pgm) polynucleotide sequence is provided in SEQ ID NO:24, and a representative phosphoglucomutase (Pgm) polypeptide sequence is provided in SEQ ID NO:73, with others provided infra (SEQ ID NOs:25, 26, 74-81). A representative glk polynucleotide sequence is provided in SEQ ID NO:82, and a representative Glk polypeptide sequence is provided in SEQ ID NO:83. A representative pgi polynucleotide sequence is provided in SEQ ID NO:84, and a representative Pgi polypeptide sequence is provided in SEQ ID NO:85.

[0347] (iv) Polynucleotide Variants, Fragments, Vectors, and Expression Systems

[0348] In particular embodiments, a polynucleotide comprises one of these polynucleotide sequences, or a fragment or variant thereof, or encodes one of these polypeptide sequences, or a fragment or variant thereof.

[0349] Exemplary nucleotide sequences that encode the proteins and enzymes of the application encompass full-length reference polynucleotides, as well as portions of the full-length or substantially full-length nucleotide sequences of these genes or their transcripts or DNA copies of these transcripts. Portions of a nucleotide sequence may encode polypeptide portions or segments that retain the biological activity of the reference polypeptide. A portion of a nucleotide sequence that encodes a biologically active fragment of an enzyme provided herein may encode at least about 20, 21, 22, 23, 24, 25, 30, 40, 50, 60, 70, 80, 90, 100, 120, 150, 200, 300, 400, 500, 600, or more contiguous amino acid residues, almost up to the total number of amino acids present in a full-length enzyme. It will be readily understood that “intermediate lengths,” in this context and in all other contexts used herein, means any length between the quoted values, such as 101, 102, 103, etc.; 151, 152, 153, etc.; 201, 202, 203, etc.

[0350] The polynucleotides described herein, regardless of the length of the coding sequence itself, may be combined with other DNA sequences, such as promoters, polyadenylation signals, additional restriction enzyme sites, multiple cloning sites, other coding segments, and the like, such that their overall length may vary considerably. It is therefore contemplated that a polynucleotide fragment of almost any length may be employed, with the total length preferably being limited by the ease of preparation and use in the intended recombinant DNA protocol.

[0351] The invention also contemplates variants of the reference polynucleotide sequences described herein (see, e.g., the Sequence Listing). Nucleic acid variants can be naturally-occurring, such as allelic variants (same locus), homologs (different locus), and orthologs (different organism) or can be non naturally-occurring. Naturally occurring variants such as these can be identified and isolated using well-known molecular biology techniques including, for example, various polymerase chain reaction (PCR) and hybridization-based techniques as known in the art. Naturally occurring variants can be isolated from any organism that encodes one or more genes having an activity of a reference polypeptide. Embodiments of the present invention, therefore, encompass Cyanobacteria comprising such naturally-occurring polynucleotide variants.

[0352] Non-naturally occurring variants can be made by mutagenesis techniques, including those applied to polynucleotides, cells, or organisms. The variants can contain nucleotide substitutions, deletions, inversions and insertions. Variation can occur in either or both the coding and non-coding regions. In certain aspects, non-naturally occurring variants may have been optimized for use in Cyanobacteria, such as by engineering and screening the enzymes for increased activity, stability, or any other desirable feature.

[0353] The variations can produce both conservative and non-conservative amino acid substitutions (as compared to the originally encoded product). For nucleotide sequences, conservative variants include those sequences that, because of the degeneracy of the genetic code, encode the amino acid sequence of a reference polypeptide. Variant nucleotide sequences also include synthetically derived polynucleotide sequences, such as those generated, for example, by using site-directed mutagenesis but which still encode a biologically active reference polypeptide, as described elsewhere herein. Generally, variants of a particular polynucleotide sequence will have at least about 30%, 40% 50%, 55%, 60%, 65%, 70%, generally at least about 75%, 80%, 85%, 90%, 95% or 98% or more sequence identity to a reference polynucleotide sequence as determined by sequence alignment programs described elsewhere herein using default parameters.

[0354] Known reference polynucleotide sequences (e.g., described herein) can be used to isolate corresponding sequences and alleles from other organisms, particularly other microorganisms. Methods are readily available in the art for the hybridization of nucleic acid sequences. Coding sequences from other organisms may be isolated according to well known techniques based on their sequence identity with the coding sequences set forth herein. In these techniques all or part of the known coding sequence is used as a probe which selectively hybridizes to other reference coding sequences present in a population of cloned genomic DNA fragments or cDNA fragments (i.e., genomic or cDNA libraries) from a chosen organism.

[0355] Accordingly, the present invention also contemplates polynucleotides that hybridize to reference nucleotide sequences, or to their complements, under stringency conditions described below. As used herein, the term “hybridizes under low stringency, medium stringency, high stringency, or very high stringency conditions” describes conditions for hybridization and washing. Guidance for performing hybridization reactions can be found in Ausubel et al., (1998, supra), Sections 6.3.1-6.3.6. Aqueous and non-aqueous methods are described in that reference and either can be used.

[0356] Reference herein to “low stringency” conditions include and encompass from at least about 1% v/v to at least about 15% v/v formamide and from at least about 1 M to at least about 2 M salt for hybridization at 42° C., and at least about 1 M to at least about 2 M salt for washing at 42° C. Low stringency conditions also may include 1% Bovine Serum Albumin (BSA), 1 mM EDTA, 0.5 M NaHPO₄ (pH 7.2), 7% SDS for hybridization at 65° C., and (i) 2×SSC, 0.1% SDS; or (ii) 0.5% BSA, 1 mM EDTA, 40 mM NaHPO₄ (pH 7.2), 5% SDS for washing at room temperature. One embodiment of low stringency conditions includes hybridization in 6×sodium chloride/sodium citrate (SSC) at about 45° C., followed by two washes in 0.2×SSC, 0.1% SDS at least at 50° C. (the temperature of the washes can be increased to 55° C. for low stringency conditions).

[0357] “Medium stringency” conditions include and encompass from at least about 16% v/v to at least about 30% v/v formamide and from at least about 0.5 M to at least about 0.9 M salt for hybridization at 42° C., and at least about 0.1 M to at least about 0.2 M salt for washing at 55° C. Medium stringency conditions also may include 1% Bovine Serum Albumin (BSA), 1 mM EDTA, 0.5 M NaHPO₄ (pH 7.2), 7% SDS for hybridization at 65° C., and (i) 2×SSC, 0.1% SDS; or (ii) 0.5% BSA, 1 mM EDTA, 40 mM NaHPO₄ (pH 7.2), 5% SDS for washing at 60-65° C. One embodiment of medium stringency conditions includes hybridizing in 6×SSC at about 45° C., followed by one or more washes in 0.2×SSC, 0.1% SDS at 60° C.

[0358] “High stringency” conditions include and encompass from at least about 31% v/v to at least about 50% v/v formamide and from about 0.01 M to about 0.15 M salt for hybridization at 42° C., and about 0.01 M to about 0.02 M salt for washing at 55° C. High stringency conditions also may include 1% BSA, 1 mM EDTA, 0.5 M NaHPO₄ (pH 7.2), 7% SDS for hybridization at 65° C., and (i) 0.2×SSC, 0.1% SDS; or (ii) 0.5% BSA, 1 mM EDTA, 40 mM NaHPO₄ (pH 7.2), 1% SDS for washing at a temperature in excess of 65° C. One embodiment of high stringency conditions includes hybridizing in 6×SSC at about 45° C., followed by one or more washes in 0.2×SSC, 0.1% SDS at 65° C.

[0359] In certain embodiments, a reference polypeptide or enzyme described herein is encoded by a polynucleotide that hybridizes to a disclosed nucleotide sequence under very high stringency conditions. One embodiment of very high stringency conditions includes hybridizing in 0.5 M sodium phosphate, 7% SDS at 65° C., followed by one or more washes in 0.2×SSC, 1% SDS at 65° C.

[0360] Other stringency conditions are well known in the art and the skilled artisan will recognize that various factors can be manipulated to optimize the specificity of the hybridization. Optimization of the stringency of the final washes can serve to ensure a high degree of hybridization. For detailed examples, see Ausubel et al., supra at pages 2.10.1 to 2.10.16 and Sambrook et al. (1989, supra) at sections 1.101 to 1.104.

[0361] While stringent washes are typically carried out at temperatures from about 42° C. to 68° C., one skilled in the art will appreciate that other temperatures may be suitable for stringent conditions. Maximum hybridization rate typically occurs at about 20° C. to 25° C. below the Tₘ for formation of a DNA-DNA hybrid. It is well known in the art that the Tₘ is the melting temperature, or temperature at which two complementary polynucleotide sequences dissociate. Methods for estimating Tₘ are well known in the art (see Ausubel et al., supra at page 2.10.8).

[0362] In general, the Tₘ of a perfectly matched duplex of DNA may be predicted as an approximation by the formula: Tₘ=81.5+16.6 (log₁₀ M)+0.41 (% G+C)−0.63 (% formamide)−(600/length) wherein: M is the concentration of Na⁺, preferably in the range of 0.01 molar to 0.4 molar; % G+C is the sum of guanosine and cytosine bases as a percentage of the total number of bases, within the range between 30% and 75% G+C; % formamide is the percent formamide concentration by volume; length is the number of base pairs in the DNA duplex. The Tₘ of a duplex DNA decreases by approximately 1° C. with every increase of 1% in the number of randomly mismatched base pairs. Washing is generally carried out at Tₘ-15° C. for high stringency, or Tₘ-30° C. for moderate stringency.

[0363] In one example of a hybridization procedure, a membrane (e.g., a nitrocellulose membrane or a nylon membrane) containing immobilized DNA is hybridized overnight at 42° C. in a hybridization buffer (50% deionized formamide, 5×SSC, 5×Reinhardt's solution (0.1% fecal, 0.1% polyvinylpyrollidone and 0.1% bovine serum albumin), 0.1% SDS and 200 mg/mL denatured salmon sperm DNA) containing a labeled probe. The membrane is then subjected to two sequential medium stringency washes (i.e., 2×SSC, 0.1% SDS for 15 min at 45° C., followed by 2×SSC, 0.1% SDS for 15 min at 50° C.), followed by two sequential higher stringency washes (i.e., 0.2×SSC, 0.1% SDS for 12 min at 55° C. followed by 0.2×SSC and 0.1% SDS solution for 12 min at 65-68° C.).

[0364] Polynucleotides and fusions thereof may be prepared, manipulated and/or expressed using any of a variety of well established techniques known and available in the art. For example, polynucleotide sequences which encode polypeptides of the invention, or fusion proteins or functional equivalents thereof, may be used in recombinant DNA molecules to direct expression of a triglyceride or lipid biosynthesis enzyme in appropriate host cells. Due to the inherent degeneracy of the genetic code, other DNA sequences that encode substantially the same or a functionally equivalent amino acid sequence may be produced and these sequences may be used to clone and express a given polypeptide.

[0365] As will be understood by those of skill in the art, it may be advantageous in some instances to produce polypeptide-encoding nucleotide sequences possessing non-naturally occurring codons. For example, codons preferred by a particular prokaryotic or eukaryotic host can be selected to increase the rate of protein expression or to produce a recombinant RNA transcript having desirable properties, such as a half-life which is longer than that of a transcript generated from the naturally occurring sequence. Such nucleotides are typically referred to as “codon-optimized.”

[0366] Moreover, the polynucleotide sequences described herein can be engineered using methods generally known in the art in order to alter polypeptide encoding sequences for a variety of reasons, including but not limited to, alterations which modify the cloning, processing, expression and/or activity of the gene product.

[0367] In order to express a desired polypeptide, a nucleotide sequence encoding the polypeptide, or a functional equivalent, may be inserted into appropriate expression vector, i.e., a vector that contains the necessary elements for the transcription and translation of the inserted coding sequence. Methods which are well known to those skilled in the art may be used to construct expression vectors containing sequences encoding a polypeptide of interest and appropriate transcriptional and translational control elements. These methods include in vitro recombinant DNA techniques, synthetic techniques, and in vivo genetic recombination. Such techniques are described in Sambrook et al., Molecular Cloning, A Laboratory Manual (1989), and Ausubel et al., Current Protocols in Molecular Biology (1989).

[0368] A variety of expression vector/host systems are known and may be utilized to contain and express polynucleotide sequences. In certain embodiments, the polynucleotides of the present invention may be introduced and expressed in Cyanobacterial systems. As such, the present invention contemplates the use of vector and plasmid systems having regulatory sequences (e.g., promoters and enhancers) that are suitable for use in various Cyanobacteria (see, e.g., Koksharova et al., Applied Microbiol Biotechnol 58:123-37, 2002). For example, the promiscuous RSF1010 plasmid provides autonomous replication in several Cyanobacteria of the genera Synechocystis and Synechococcus (see, e.g., Mermet-Bouvier et al., Curr Microbiol 26:323-327, 1993). As another example, the pFC1 expression vector is based on the promiscuous plasmid RSF1010. pFC1 harbors the lambda cI857 repressor-encoding gene and pR promoter, followed by the lambda cro ribosome-binding site and ATG translation initiation codon (see, e.g., Mermet-Bouvier et al., Curr Microbiol 28:145-148, 1994). The latter is located within the unique NdeI restriction site (CATATG) of pFC1 and can be exposed after cleavage with this enzyme for in-frame fusion with the protein-coding sequence to be expressed.

[0369] The “control elements” or “regulatory sequences” present in an expression vector (or employed separately) are those non-translated regions of the vector—enhancers, promoters, 5′ and 3′ untranslated regions—which interact with host cellular proteins to carry out transcription and translation. Such elements may vary in their strength and specificity. Depending on the vector system and host utilized, any number of suitable transcription and translation elements, including constitutive and inducible promoters, may be used. Generally, it is well-known that strong E. coli promoters work well in Cyanobacteria. Also, when cloning in Cyanobacterial systems, inducible promoters such as the hybrid lacZ promoter of the PBLUESCRIPT phagemid (Stratagene, La Jolla, Calif.) or PSPORT1 plasmid (Gibco BRL, Gaithersburg, Md.) and the like may be used. Other vectors containing IPTG inducible promoters, such as pAM1579 and pAM2991trc, may be utilized according to the present invention.

[0370] Certain embodiments may employ a temperature inducible system or temperature inducible regulatory sequences (e.g., promoters, enhancers, repressors). As one example, an operon with the bacterial phage left-ward promoter (P_{L}) and a temperature sensitive repressor gene CI857 may be employed to produce a temperature inducible system for producing fatty acids and/or triglycerides in Cyanobacteria (see, e.g., U.S. Pat. No. 6,306,639, herein incorporated by reference). It is believed that at a non-permissible temperature (low temperature, 30 degrees Celsius), the repressor binds to the operator sequence, and thus prevents RNA polymerase from initiating transcription at the P_{L} promoter. Therefore, the expression of encoded gene or genes is repressed. When the cell culture is transferred to a permissible temperature (37-42 degrees Celsius), the repressor cannot bind to the operator. Under these conditions, RNA polymerase can initiate the transcription of the encoded gene or genes.

[0371] In Cyanobacterial systems, a number of expression vectors or regulatory sequences may be selected depending upon the use intended for the expressed polypeptide. When large quantities are needed, vectors or regulatory sequences which direct high level expression of encoded proteins may be used. For example, overexpression of ACCase enzymes may be utilized to increase fatty acid biosynthesis. Such vectors include, but are not limited to, the multifunctional E. coli cloning and expression vectors such as BLUESCRIPT (Stratagene), in which the sequence encoding the polypeptide of interest may be ligated into the vector in frame with sequences for the amino-terminal Met and the subsequent 7 residues of β-galactosidase so that a hybrid protein is produced; pIN vectors (Van Heeke & Schuster, J. Biol. Chem. 264:5503 5509 (1989)); and the like. pGEX Vectors (Promega, Madison, Wis.) may also be used to express foreign polypeptides as fusion proteins with glutathione S-transferase (GST).

[0372] Certain embodiments may employ Cyanobacterial promoters or regulatory operons. In certain embodiments, a promoter may comprise an rbcLS operon of Synechococcus, as described, for example, in Ronen-Tarazi et al. (Plant Physiology 18:1461-1469, 1995), or a cpc operon of Synechocystis sp. strain PCC 6714, as described, for example, in Imashimizu et al. (J Bacteriol. 185:6477-80, 2003). In certain embodiments, the tRNApro gene from Synechococcus may also be utilized as a promoter, as described in Chungjatupornchai et al. (Curr Microbiol. 38:210-216, 1999). Certain embodiments may employ the nirA promoter from Synechococcus sp. strain PCC7942, which is repressed by ammonium and induced by nitrite (see, e.g., Maeda et al., J. Bacteriol. 180:4080-4088, 1998; and Qi et al., Applied and Environmental Microbiology 71:5678-5684, 2005). The efficiency of expression may be enhanced by the inclusion of enhancers which are appropriate for the particular Cyanobacterial cell system which is used, such as those described in the literature.

[0373] In certain embodiments, expression vectors or introduced promoters utilized to overexpress an exogenous or endogenous reference polypeptide, or fragment or variant thereof, comprise a weak promoter under non-inducible conditions, e.g., to avoid toxic effects of long-term overexpression of any of these polypeptides. One example of such a vector for use in Cyanobacteria is the pBAD vector system. Expression levels from any given promoter may be determined, e.g., by performing quantitative polymerase chain reaction (qPCR) to determine the amount of transcript or mRNA produced by a promoter, e.g., before and after induction. In certain instances, a weak promoter is defined as a promoter that has a basal level of expression of a gene or transcript of interest, in the absence of inducer, that is ≦2.0% of the expression level produced by the promoter of the rnpB gene in S. elongatus PCC7942. In other embodiments, a weak promoter is defined as a promoter that has a basal level of expression of a gene or transcript of interest, in the absence of inducer, that is ≦5.0% of the expression level produced by the promoter of the rnpB gene in S. elongatus PCC7942.

[0374] It will be apparent that further to their use in vectors, any of the regulatory elements described herein (e.g., promoters, enhancers, repressors, ribosome binding sites, transcription termination sites) may be introduced directly into the genome of a photosynthetic microorganism (e.g., Cyanobacterium), typically in a region surrounding (e.g., upstream or downstream of) an endogenous or naturally-occurring reference gene/polynucleotide sequence described herein, to regulate expression (e.g., facilitate overexpression) of that gene.

[0375] Specific initiation signals may also be used to achieve more efficient translation of sequences encoding a polypeptide of interest. Such signals include the ATG initiation codon and adjacent sequences. In cases where sequences encoding the polypeptide, its initiation codon, and upstream sequences are inserted into the appropriate expression vector, no additional transcriptional or translational control signals may be needed. However, in cases where only coding sequence, or a portion thereof, is inserted, exogenous translational control signals including the ATG initiation codon should be provided. Furthermore, the initiation codon should be in the correct reading frame to ensure translation of the entire insert. Exogenous translational elements and initiation codons may be of various origins, both natural and synthetic.

[0376] A variety of protocols for detecting and measuring the expression of polynucleotide-encoded products, using either polyclonal or monoclonal antibodies specific for the product are known in the art. Examples include enzyme-linked immunosorbent assay (ELISA), radioimmunoassay (RIA), and fluorescence activated cell sorting (FACS). These and other assays are described, among other places, in Hampton et al., Serological Methods, a Laboratory Manual (1990) and Maddox et al., J. Exp. Med. 158:1211-1216 (1983). The presence or expression levels of a desired polynucleotide may also be confirmed by PCR.

[0377] A wide variety of labels and conjugation techniques are known by those skilled in the art and may be used in various nucleic acid and amino acid assays. Means for producing labeled hybridization or PCR probes for detecting sequences related to polynucleotides include oligolabeling, nick translation, end-labeling or PCR amplification using a labeled nucleotide. Alternatively, the sequences, or any portions thereof may be cloned into a vector for the production of an mRNA probe. Such vectors are known in the art, are commercially available, and may be used to synthesize RNA probes in vitro by addition of an appropriate RNA polymerase such as T7, T3, or SP6 and labeled nucleotides. These procedures may be conducted using a variety of commercially available kits. Suitable reporter molecules or labels, which may be used include radionuclides, enzymes, fluorescent, chemiluminescent, or chromogenic agents as well as substrates, cofactors, inhibitors, magnetic particles, and the like.

[0378] Cyanobacterial host cells transformed with a polynucleotide sequence of interest may be cultured under conditions suitable for the expression and recovery of the protein from cell culture. The protein produced by a recombinant cell may be secreted or contained intracellularly depending on the sequence and/or the vector used. As will be understood by those of skill in the art, expression vectors containing polynucleotides of the invention may be designed to contain signal sequences which direct localization of the encoded polypeptide to a desired site within the cell. Other recombinant constructions may be used to join sequences encoding a polypeptide of interest to nucleotide sequence encoding a polypeptide domain which will direct secretion of the encoded protein.

### D. MODIFIED PHOTOSYNTHETIC MICROORGANISMS

[0379] Certain embodiments relate to modified photosynthetic microorganisms, including Cyanobacteria, and methods of use thereof, wherein the modified photosynthetic microorganisms comprise one or more over-expressed, exogenous or introduced intracellular localization domain-DGAT fusion proteins, and a corresponding polynucleotide that encodes the same, where the DGAT fusion protein comprises a heterologous intracellular localization domain and a DGAT polypeptide, or variant or fragment thereof. In particular embodiments, the DGAT fusion protein is a membrane-targeting domain- or plasma membrane (PM)-targeting domain-DGAT fusion proteins. In some embodiments, the DGAT polypeptide variant or fragment retains at least 50% of one or more activities of the wild-type DGAT polypeptide.

[0380] In certain aspects, the DGAT-fusion protein-expressing photosynthetic microorganisms described herein can further comprise one or more introduced or overexpressed lipid biosynthesis proteins. Examples of lipid biosynthesis proteins include, without limitation, acyl carrier proteins (ACP), acyl ACP synthases (Aas), acyl-ACP reductases, alcohol dehydrogenases, aldehyde dehydrogenases, aldehyde decarbonylases, thioesterases (TES), acetyl coenzyme A carboxylases (ACCase), phosphatidic acid phosphatases (PAP; or phosphatidate phosphatases), triacylglycerol (TAG) hydrolases, fatty acyl-CoA synthetases, and lipases/phospholipases, including any combinations thereof.

[0381] Certain preferred combinations include modified photosynthetic microorganisms having an exogenous or overexpressed DGAT fusion protein described herein in combination with an exogenous or overexpressed ACP; a DGAT fusion protein in combination with an Aas; a DGAT fusion protein in combination with an ACP and an Aas; a DGAT fusion protein in combination with an ACP and a TES such as *TesA or a FatB; a DGAT fusion protein in combination with an Aas and a TES such as *TesA or a FatB; and/or a DGAT fusion protein in combination with an ACP, an Aas, and a TES.

[0382] Also included are combinations that incorporate one or more TAG hydrolases into a TAG-producing strain. For example, certain embodiments include modified photosynthetic microorganisms having a DGAT fusion protein described herein, an exogenous or overexpressed ACP, Aas, or both, in combination with an exogenous or over-expressed TAG hydrolase, and optionally a TES. Certain embodiments, however, may employ a DGAT fusion protein and an over-expressed or exogenous TAG hydrolase, and optionally a TES, such as TesA (or *TesA) or any one or more of the FatB sequences, with or without an ACP or Aas. Hence, these and related embodiments may be employed separately from those that require an ACP, an Aas, or both. For instance, certain embodiments may comprise a DGAT fusion protein and TAG hydrolase, and optionally a TES. Any one of these embodiments can be further combined with one or more additional lipid biosynthesis proteins, such as an ACCase, a PAP, a fatty acyl-CoA synthetase, and/or a PL such as PLC.

[0383] Certain combinations incorporate one or more fatty acyl-CoA synthetases (e.g., FadD) into a DGAT fusion protein-expressing photosynthetic microorganism. For instance, certain embodiments include modified photosynthetic microorganisms having an exogenous or overexpressed ACP, Aas, or both, in combination with a DGAT fusion protein and a fatty acyl-CoA synthetase, and optionally a TES and/or a TAG hydrolase. Certain embodiments, however, may employ a DGAT fusion protein and an over-expressed or exogenous a fatty acyl-CoA synthetase, and optionally a TES, such as TesA (or *TesA) or any one or more of the FatB sequences, with or without an ACP or Aas. Hence, these and related embodiments may be employed separately from those that require an ACP, Aas, or both. For instance, certain embodiments may comprise a DGAT fusion protein and a fatty acyl-CoA synthetase, and optionally a TES (e.g., TesA, FatB). Any one of these embodiments can be further combined with one or more additional lipid biosynthesis proteins, such as an ACCase, a PAP, a TAG hydrolase, and/or a PL such as PLC.

[0384] Any one of these embodiments can also be combined with one or more introduced or overexpressed polynucleotides encoding a protein involved in a glycogen breakdown pathway, and/or with a strain having reduced expression of glycogen biosynthesis or storage pathways (e.g., full or partial deletion of glucose-1-phosphate adenyltransferase (glgC) gene and/or a phosphoglucomutase (pgm) gene). For instance, a specific modified photosynthetic microorganism could comprise a DGAT fusion protein described herein, an exogenous or overexpressed ACP, Aas, DGAT and PAP, combined with a full or partial deletion of the glgC gene and/or the pgm gene.

[0385] Photosynthetic microorganisms of the present invention can also be modified to increase the production of fatty acids by introducing one or more exogenous polynucleotide sequences that encode one or more enzymes associated with fatty acid synthesis. In certain aspects, the exogenous polynucleotide sequence encodes an enzyme that comprises an acyl-CoA carboxylase (ACCase) activity, typically allowing increased ACCase expression, and, thus, increased intracellular ACCase activity. Increased intracellular ACCase activity contributes to the increased production of fatty acids because this enzyme catalyzes the “commitment step” of fatty acid synthesis. Similarly, in some aspects, modified photosynthetic microorganisms may comprise a DGAT fusion protein described herein in combination with an acyl-ACP reductase, for instance, to increase the production of fatty acids, a starting material for triglycerides, and thereby increase production of triglycerides.

[0386] Other combinations include, for example, a modified photosynthetic microorganism comprising a DGAT fusion protein described herein and one of the following: an exogenous or overexpressed ACP in combination with an exogenous or overexpressed ACCase; an Aas in combination with an ACCase; an ACP and an Aas in combination with an ACCase; an ACP in combination with a PAP; an Aas in combination with a PAP; an ACP and an Aas in combination with a PAP; an ACP in combination with a PL such as PLA, PLB, or PLC; an Aas in combination with a PL; and an ACP and an Aas in combination with a PL. Any one of these embodiments can be combined with each other (e.g., ACP, Aas, ACCase, and PAP), and/or further combined with an exogenous or overexpressed TES. Any one of these embodiments can also be combined with one or more introduced polynucleotides encoding a protein involved in a glycogen breakdown pathway, and/or with a strain having reduced expression of glycogen biosynthesis or storage pathways (e.g., full or partial deletion of glucose-1-phosphate adenyltransferase (glgC) gene and/or a phosphoglucomutase (pgm) gene).

[0387] Any one of the above embodiments can also be combined with a strain having reduced expression of an aldehyde decarbonylase. In certain embodiments, such as Cyanobacteria including S. elongatus PCC7942, orf1593 resides directly upstream of orf1594 (acyl-ACP reductase coding region) and encodes an aldehyde decarbonylase. According to one non-limiting theory, because the aldehyde decarbonylase encoded by orf1593 utilizes acyl aldehyde as a substrate for alkane production, reducing expression of this protein may further increase yields of free fatty acids by shunting acyl aldehydes (produced by acyl-ACP reductase) away from an alkane-producing pathway, and towards a fatty acid-producing and storage pathway. PCC7942_orf1593 orthologs can be found, for example, in Synechocystis sp. PCC6803 (encoded by orfsll0208), N. punctiforme PCC 73102, Thermosynechococcus elongatus BP-1, Synechococcus sp. Ja-3-3AB, P. marinus MIT9313, P. marinus NATL2A, and Synechococcus sp. RS 9117, the latter having at least two paralogs (RS 9117-1 and -2). Included are strains having mutations or full or partial deletions of one or more genes encoding these and other aldehyde decarbonylases, such as S. elongatus PCC7942 having a full or partial deletion of orf1593, and Synechocystis sp. PCC6803 having a full or partial deletion of orfsll0208). For instance, a specific modified photosynthetic microorganism could comprise an overexpressed acyl-ACP reductase, combined with a full or partial deletion of the glgC gene and/or the pgm gene, optionally combined with an overexpressed ACP, ACCase, DGAT/acyl-CoA synthetase, or all of the foregoing, and optionally combined with a full or partial deletion of a gene encoding an aldehyde decarbonylase (e.g., PCC7942_orf1593, PCC6803_orfsll0208).

[0388] Any one of these embodiments can also be combined with a strain having reduced expression of an acyl-ACP synthetase (Aas). Without wishing to be bound by any one theory, an endogenous aldehyde dehydrogenase is acting on the acyl-aldehydes generated by orf1594 and converting them to free fatty acids. The normal role of such a dehydrogenase might involve removing or otherwise dealing with damaged lipids. In this scenario, it is then likely that the Aas gene product recycles these free fatty acids by ligating them to ACP. Accordingly, reducing or eliminating expression of the Aas gene product might ultimately increase production of fatty acids, by reducing or preventing their transfer to ACP. Included are mutations and full or partial deletions of one or more Aas genes, such as the Aas gene of Synechococcus elongatus PCC 7942. As one example, a specific modified photosynthetic microorganism could comprise an overexpressed acyl-ACP reductase, combined with a full or partial deletion of the glgC gene and/or the pgm gene, optionally combined with an overexpressed ACP, ACCase, DGAT/acyl-CoA synthetase, or all of the foregoing, optionally combined with a full or partial deletion of a gene encoding an aldehyde decarbonylase (e.g., PCC7942_orf1593, PCC6803_orfsll0208), and optionally combined with a full or partial deletion of an Aas gene encoding an acyl-ACP synthetase.

[0389] Any one or more of these embodiments can also be combined with a strain having increased expression of an aldehyde dehydrogenase. One exemplary aldehyde dehydrogenase is encoded by orf0489 of Synechococcus elongatus PCC7942. Also included are homologs or paralogs thereof, functional equivalents thereof, and fragments or variants thereof. Functional equivalents can include aldehyde dehydrogenases with the ability to convert acyl aldehydes (e.g., nonyl-aldehyde) into fatty acids. In specific embodiments, the aldehyde dehydrogenase has the amino acid sequence of SEQ ID NO:103 (encoded by the polynucleotide sequence of SEQ ID NO:102), or an active fragment or variant of this sequence

[0390] Some modified photosynthetic microorganisms may comprise a DGAT fusion protein described herein and an introduced or overexpressed acyl-ACP reductase, to increase production of triglycerides; optionally in further combination with an introduced or overexpressed alcohol dehydrogenase, for instance, to produce wax esters relative to other lipids. Certain of these and related embodiments may be combined with reduced expression and/or activity of at least one endogenous aldehyde decarbonylase, endogenous aldehyde dehydrogenase, or both.

[0391] For instance, particular modified photosynthetic microorganisms may comprise a DGAT fusion protein described herein in combination with an overexpressed or introduced acyl-ACP reductase and an overexpressed or introduced alcohol dehydrogenase, and in further combination with at least one mutation (e.g., point mutation, insertion, full or partial deletion) that reduces the expression and/or activity of an endogenous aldehyde decarbonylase. Certain modified photosynthetic microorganisms may comprise a DGAT fusion protein in combination with an overexpressed or introduced acyl-ACP reductase and an overexpressed or introduced alcohol dehydrogenase, and in further combination with at least one mutation (e.g., point mutation, insertion, full or partial deletion) that reduces the expression and/or activity of an endogenous aldehyde dehydrogenase. Some embodiments may include modified photosynthetic microorganisms that comprises a DGAT fusion protein in combination with an overexpressed or introduced acyl-ACP reductase and an overexpressed or introduced alcohol dehydrogenase, in further combination with at least one mutation that reduces the expression and/or activity of an endogenous aldehyde dehydrogenase and at least one mutation that reduces the expression and/or activity of an endogenous aldehyde decarbonylase. In specific embodiments, for instance, where the modified photosynthetic microorganism is S. elongatus, the aldehyde dehydrogenase is encoded by orf0489 and the aldehyde decarbonylase is encoded by orf1593 of S. elongatus.

[0392] Other combinations include, for example, a modified photosynthetic microorganism comprising a DGAT fusion protein described herein and reduced glycogen accumulation, in combination with one more of an overexpressed ACP; an overexpressed acyl-ACP reductase in combination with an overexpressed ACP; an acyl-ACP reductase in combination with an ACCase; an acyl-ACP reductase in combination with an ACP and an ACCase; an overexpressed acyl-ACP reductase in combination with an overexpressed acyl-CoA synthetase (e.g., a membrane-targeting domain-DGAT fusion/acyl-CoA synthetase combination); an overexpressed acyl-ACP reductase with an overexpressed ACCase optionally in combination with an overexpressed acyl-CoA synthetase; and an overexpressed acyl-ACP reductase with an overexpressed ACP and ACCase, optionally in combination with an overexpressed acyl-CoA synthetase. Acyl-ACP reductase and DGAT-overexpressing strains, optionally in combination with an overexpressed acyl-CoA synthetase, typically produce increased triglycerides relative to DGAT-only overexpressing strains. Any one of these embodiments can be combined with one or more introduced polynucleotides encoding a protein involved in a glycogen breakdown pathway, and/or with a strain having reduced expression of glycogen biosynthesis or storage pathways (e.g., full or partial deletion of glucose-1-phosphate adenyltransferase (glgC) gene and/or a phosphoglucomutase (pgm) gene). The present invention contemplates the use of any type of polynucleotide encoding a protein or enzyme associated with glycogen breakdown, removal, and/or elimination, as long as the modified photosynthetic microorganism accumulates a reduced amount of glycogen as compared to the wild type photosynthetic microorganism (e.g., under stress conditions).

[0393] Increased expression or overexpression can be achieved a variety of ways, for example, by introducing a polynucleotide into the microorganism, modifying an endogenous gene to overexpress the polypeptide (e.g., by introducing an exogenous regulatory element such as a promoter), or both. For instance, one or more copies of an otherwise endogenous polynucleotide sequence can be introduced by recombinant techniques to increase expression, that is, to create additional copies of the otherwise endogenous polynucleotide sequence. Decreased expression and/or activity can also be achieved a variety of ways, described elsewhere herein and known in the art, including by mutation of coding and/or regulatory sequences of a gene of interest, and/or by RNA inhibition.

[0394] Modified photosynthetic microorganisms of the present invention may be produced using any type of photosynthetic microorganism. These include, but are not limited to photosynthetic bacteria, green algae, and cyanobacteria. The photosynthetic microorganism can be, for example, a naturally photosynthetic microorganism, such as a Cyanobacterium, or an engineered photosynthetic microorganism, such as an artificially photosynthetic bacterium. Exemplary microorganisms that are either naturally photosynthetic or can be engineered to be photosynthetic include, but are not limited to, bacteria; fungi; archaea; protists; eukaryotes, such as a green algae; and animals such as plankton, planarian, and amoeba. Examples of naturally occurring photosynthetic microorganisms include, but are not limited to, Spirulina maximum, Spirulina platensis, Dunaliella salina, Botrycoccus braunii, Chlorella vulgaris, Chlorella pyrenoidosa, Serenastrum capricomutum, Scenedesmus auadricauda, Porphyridium cruentum, Scenedesmus acutus, Dunaliella sp., Scenedesmus obliquus, Anabaenopsis, Aulosira, Cylindrospermum, Synechococcus sp., Synechocystis sp., and/or Tolypothrix.

[0395] A modified Cyanobacteria of the present invention may be from any genera or species of Cyanobacteria that is genetically manipulable, i.e., permissible to the introduction and expression of exogenous genetic material. Examples of Cyanobacteria that can be engineered according to the methods of the present invention include, but are not limited to, the genus Synechocystis, Synechococcus, Thermosynechococcus, Nostoc, Prochlorococcu, Microcystis, Anabaena, Spirulina, and Gloeobacter.

[0396] Cyanobacteria, also known as blue-green algae, blue-green bacteria, or Cyanophyta, is a phylum of bacteria that obtain their energy through photosynthesis. Cyanobacteria can produce metabolites, such as carbohydrates, proteins, lipids and nucleic acids, from CO₂, water, inorganic salts and light. Any Cyanobacteria may be used according to the present invention.

[0397] Cyanobacteria include both unicellular and colonial species. Colonies may form filaments, sheets or even hollow balls. Some filamentous colonies show the ability to differentiate into several different cell types, such as vegetative cells, the normal, photosynthetic cells that are formed under favorable growing conditions; akinetes, the climate-resistant spores that may form when environmental conditions become harsh; and thick-walled heterocysts, which contain the enzyme nitrogenase, vital for nitrogen fixation.

[0398] Heterocysts may also form under the appropriate environmental conditions (e.g., anoxic) whenever nitrogen is necessary. Heterocyst-forming species are specialized for nitrogen fixation and are able to fix nitrogen gas, which cannot be used by plants, into ammonia (NH₃), nitrites (NO₂⁻), or nitrates (NO₃⁻), which can be absorbed by plants and converted to protein and nucleic acids.

[0399] Many Cyanobacteria also form motile filaments, called hormogonia, which travel away from the main biomass to bud and form new colonies elsewhere. The cells in a hormogonium are often thinner than in the vegetative state, and the cells on either end of the motile chain may be tapered. In order to break away from the parent colony, a hormogonium often must tear apart a weaker cell in a filament, called a necridium.

[0400] Each individual Cyanobacterial cell typically has a thick, gelatinous cell wall. Cyanobacteria differ from other gram-negative bacteria in that the quorum sensing molecules autoinducer-2 and acyl-homoserine lactones are absent. They lack flagella, but hormogonia and some unicellular species may move about by gliding along surfaces. In water columns, some Cyanobacteria float by forming gas vesicles, like in archaea.

[0401] Cyanobacteria have an elaborate and highly organized system of internal membranes that function in photosynthesis. Photosynthesis in Cyanobacteria generally uses water as an electron donor and produces oxygen as a by-product, though some Cyanobacteria may also use hydrogen sulfide, similar to other photosynthetic bacteria. Carbon dioxide is reduced to form carbohydrates via the Calvin cycle. In most forms, the photosynthetic machinery is embedded into folds of the cell membrane, called thylakoids. Due to their ability to fix nitrogen in aerobic conditions, Cyanobacteria are often found as symbionts with a number of other groups of organisms such as fungi (e.g., lichens), corals, pteridophytes (e.g., Azolla), and angiosperms (e.g., Gunnera), among others.

[0402] Cyanobacteria are the only group of organisms that are able to reduce nitrogen and carbon in aerobic conditions. The water-oxidizing photosynthesis is accomplished by coupling the activity of photosystem (PS) II and I (Z-scheme). In anaerobic conditions, Cyanobacteria are also able to use only PS I (i.e., cyclic photophosphorylation) with electron donors other than water (e.g., hydrogen sulfide, thiosulphate, or molecular hydrogen), similar to purple photosynthetic bacteria. Furthermore, Cyanobacteria share an archaeal property; the ability to reduce elemental sulfur by anaerobic respiration in the dark. The Cyanobacterial photosynthetic electron transport system shares the same compartment as the components of respiratory electron transport. Typically, the plasma membrane contains only components of the respiratory chain, while the thylakoid membrane hosts both respiratory and photosynthetic electron transport.

[0403] Phycobilisomes, attached to the thylakoid membrane, act as light harvesting antennae for the photosystems of Cyanobacteria. The phycobilisome components (phycobiliproteins) are responsible for the blue-green pigmentation of most Cyanobacteria. Color variations are mainly due to carotenoids and phycoerythrins, which may provide the cells with a red-brownish coloration. In some Cyanobacteria, the color of light influences the composition of phycobilisomes. In green light, the cells accumulate more phycoerythrin, whereas in red light they produce more phycocyanin. Thus, the bacteria appear green in red light and red in green light. This process is known as complementary chromatic adaptation and represents a way for the cells to maximize the use of available light for photosynthesis.

[0404] In particular embodiments, the Cyanobacteria may be, e.g., a marine form of Cyanobacteria or a fresh water form of Cyanobacteria. Examples of marine forms of Cyanobacteria include, but are not limited to Synechococcus WH8102, Synechococcus RCC307, Synechococcus NKBG 15041c, and Trichodesmium. Examples of fresh water forms of Cyanobacteria include, but are not limited to, S. elongatus PCC 7942, Synechocystis PCC 6803, Plectonema boryanum, and Anabaena sp. Exogenous genetic material encoding the desired enzymes or polypeptides may be introduced either transiently, such as in certain self-replicating vectors, or stably, such as by integration (e.g., recombination) into the Cyanobacterium's native genome.

[0405] In other embodiments, a genetically modified Cyanobacteria of the present invention may be capable of growing in brackish or salt water. When using a fresh water form of Cyanobacteria, the overall net cost for production of triglycerides will depend on both the nutrients required to grow the culture and the price for freshwater. One can foresee freshwater being a limited resource in the future, and in that case it would be more cost effective to find an alternative to freshwater. Two such alternatives include: (1) the use of waste water from treatment plants; and (2) the use of salt or brackish water.

[0406] Salt water in the oceans can range in salinity between 3.1% and 3.8%, the average being 3.5%, and this is mostly, but not entirely, made up of sodium chloride (NaCl) ions. Brackish water, on the other hand, has more salinity than freshwater, but not as much as seawater. Brackish water contains between about 0.5% and 3% salinity, and thus includes a large range of salinity regimes and is therefore not precisely defined. Waste water is any water that has undergone human influence. It consists of liquid waste released from domestic and commercial properties, industry, and/or agriculture and can encompass a wide range of possible contaminants at varying concentrations.

[0407] There is a broad distribution of Cyanobacteria in the oceans, with Synechococcus filling just one niche. Specifically, Synechococcus sp. PCC 7002 (formerly known as Agmenellum quadruplicatum strain PR-6) grows in brackish water, is unicellular and has an optimal growing temperature of 38° C. While this strain is well suited to grow in conditions of high salt, it will grow slowly in freshwater. In particular embodiments, the present invention contemplates the use of a Cyanobacteria S. elongatus PCC 7942, altered in a way that allows for growth in either waste water or salt/brackish water. A S. elongatus PCC 7942 mutant resistant to sodium chloride stress has been described (Bagchi, S. N. et al., Photosynth Res. 2007, 92:87-101), and a genetically modified S. elongatus PCC 7942 tolerant of growth in salt water has been described (Waditee, R. et al., PNAS. 2002, 99:4109-4114). According to the present invention, a salt water tolerant strain is capable of growing in water or media having a salinity in the range of 0.5% to 4.0% salinity, although it is not necessarily capable of growing in all salinities encompassed by this range. In one embodiment, a salt tolerant strain is capable of growth in water or media having a salinity in the range of 1.0% to 2.0% salinity. In another embodiment, a salt water tolerant strain is capable of growth in water or media having a salinity in the range of 2.0% to 3.0% salinity.

[0408] Examples of Cyanobacteria that may be utilized and/or genetically modified according to the methods described herein include, but are not limited to, Chroococcales Cyanobacteria from the genera Aphanocapsa, Aphanothece, Chamaesiphon, Chroococcus, Chroogloeocystis, Coelosphaerium, Crocosphaera, Cyanobacterium, Cyanobium, Cyanodictyon, Cyanosarcina, Cyanothece, Dactylococcopsis, Gloecapsa, Gloeothece, Merismopedia, Microcystis, Radiocystis, Rhabdoderma, Snowella, Synychococcus, Synechocystis, Thermosenechococcus, and Woronichinia; Nostacales Cyanobacteria from the genera Anabaena, Anabaenopsis, Aphanizomenon, Aulosira, Calothrix, Coleodesmium, Cyanospira, Cylindrospermosis, Cylindrospermum, Fremyella, Gleotrichia, Microchaete, Nodularia, Nostoc, Rexia, Richelia, Scytonema, Sprirestis, and Toypothrix; Oscillatoriales Cyanobacteria from the genera Arthrospira, Geitlerinema, Halomicronema, Halospirulina, Katagnymene, Leptolyngbya, Limnothrix, Lyngbya, Microcoleus, Oscillatoria, Phormidium, Planktothricoides, Planktothrix, Plectonema, Pseudoanabaena/Limnothrix, Schizothrix, Spirulina, Symploca, Trichodesmium, Tychonema; Pleurocapsales cyanobacterium from the genera Chroococcidiopsis, Dermocarpa, Dermocarpella, Myxosarcina, Pleurocapsa, Stanieria, Xenococcus; Prochlorophytes Cyanobacterium from the genera Prochloron, Prochlorococcus, Prochlorothrix; and Stigonematales cyanobacterium from the genera Capsosira, Chlorogeoepsis, Fischerella, Hapalosiphon, Mastigocladopsis, Nostochopsis, Stigonema, Symphyonema, Symphonemopsis, Umezakia, and Westiellopsis. In certain embodiments, the Cyanobacterium is from the genus Synechococcus, including, but not limited to Synechococcus bigranulatus, Synechococcus elongatus, Synechococcus leopoliensis, Synechococcus lividus, Synechococcus nidulans, and Synechococcus rubescens.

[0409] In certain embodiments, the Cyanobacterium is Anabaena sp. strain PCC 7120, Synechocystis sp. strain PCC 6803, Nostoc muscorum, Nostoc ellipsosporum, or Nostoc sp. strain PCC 7120. In certain preferred embodiments, the Cyanobacterium is S. elongatus sp. strain PCC 7942.

[0410] Additional examples of Cyanobacteria that may be utilized in the methods provided herein include, but are not limited to, Synechococcus sp. strains WH7803, WH8102, WH8103 (typically genetically modified by conjugation), Baeocyte-forming Chroococcidiopsis spp. (typically modified by conjugation/electroporation), non-heterocyst-forming filamentous strains Planktothrix sp., Plectonema boryanum M101 (typically modified by electroporation), and Heterocyst-forming strains Anabaena sp. strains ATCC 29413 (typically modified by conjugation), Tolypothrix sp. strain PCC 7601 (typically modified by conjugation/electroporation) and Nostoc punctiforme strain ATCC 29133 (typically modified by conjugation/electroporation).

[0411] In certain preferred embodiments, the Cyanobacterium may be S. elongatus sp. strain PCC 7942 or Synechococcus sp. PCC 7002 (originally known as Agmenellum quadruplicatum).

[0412] In particular embodiments, the genetically modified, photosynthetic microorganism, e.g., Cyanobacteria, of the present invention may be used to produce triglycerides and/or other carbon-based products from just sunlight, water, air, and minimal nutrients, using routine culture techniques of any reasonably desired scale. In specific embodiments, the present invention contemplates using spontaneous mutants of photosynthetic microorganisms that demonstrate a growth advantage under a defined growth condition. Among other benefits, the ability to produce large amounts of triglycerides from minimal energy and nutrient input makes the modified photosynthetic microorganism, e.g., Cyanobacteria, of the present invention a readily manageable and efficient source of feedstock in the subsequent production of both biofuels, such as biodiesel, as well as specialty chemicals, such as glycerin.

### E. METHODS OF PRODUCING MODIFIED PHOTOSYNTHETIC MICROORGANISMS

[0413] Embodiments of the present invention also include methods of producing the modified photosynthetic microorganisms (e.g., Cyanobacterium) described herein.

[0414] In certain embodiments, the present invention comprises methods of modifying a photosynthetic microorganism to produce a modified photosynthetic microorganism that produces an increased amount of lipids, e.g., triglycerides, relative to a corresponding wild type photosynthetic microorganism or a differently modified photosynthetic microorganism (e.g., one that expresses DGAT but not a form that selectively localizes to an intracellular region such as a membrane, including the plasma membrane), comprising introducing into said microorganism one or more polynucleotides encoding a intracellular localization domain-DGAT fusion protein described herein, including active fragments or variants thereof.

[0415] Also included are methods of modifying a photosynthetic microorganism to produce a modified photosynthetic microorganism that has improved cell growth characteristics, relative to a corresponding, DGAT-expressing modified photosynthetic microorganism where the DGAT does not have a heterologous intracellular localization domain (e.g., a wild-type DGAT), comprising introducing into said microorganism one or more polynucleotides encoding a intracellular localization domain-DGAT fusion protein described herein, including active fragments or variants thereof.

[0416] The methods may further comprise a step of selecting for photosynthetic microorganisms in which the one or more desired polynucleotides were successfully introduced, where the polynucleotides were, e.g., present in a vector that expressed a selectable marker, such as an antibiotic resistance gene. As one example, selection and isolation may include the use of antibiotic resistant markers known in the art (e.g., kanamycin, spectinomycin, and streptomycin).

[0417] In certain aspects, such photosynthetic microorganisms can be further modified by increasing the expression of one or more lipid biosynthesis proteins, for instance, by introducing an exogenous copy of a polynucleotide that encodes a lipid biosynthesis protein, by increasing expression of an endogenous lipid biosynthesis protein, or both. In some aspects, such photosynthetic microorganisms can be further modified by increasing the expression of one or more proteins associated with glycogen breakdown, for instance, by introducing an exogenous copy of a polynucleotide that encodes a glycogen breakdown protein, by increasing expression of an endogenous glycogen breakdown protein, or both.

[0418] Thus, in certain embodiments, the present invention includes methods of producing a modified photosynthetic microorganism, e.g., a Cyanobacteria, comprising: (1) introducing into said photosynthetic microorganism one or more polynucleotides encoding one or more intracellular localization domain-DGAT fusion proteins, and (2) introducing into said photosynthetic microorganism one or more operatively linked promoters (e.g., inducible or regulable promoters) into a region upstream of an endogenous lipid biosynthesis protein coding sequence, and/or introducing one or more polynucleotides encoding a lipid biosynthesis protein, or a fragment or variant thereof. Exemplary lipid biosynthesis proteins include any one or more of acyl carrier proteins (ACP), acyl ACP synthetases (Aas), acyl-ACP reductases, alcohol dehydrogenases, aldehyde dehydrogenases, aldehyde decarbonylases, thioesterases (TES), acetyl coenzyme A carboxylases (ACCase), phosphatidic acid phosphatases (PAP; or phosphatidate phosphatases), triacylglycerol (TAG) hydrolases, fatty acyl-CoA synthetases, and lipases/phospholipases, including any combination thereof.

[0419] Certain embodiments include methods of producing a modified photosynthetic microorganism, e.g., a Cyanobacteria, comprising: (1) introducing into said photosynthetic microorganism one or more polynucleotides encoding one or more intracellular localization domain-DGAT fusion proteins, and (2) introducing into said photosynthetic microorganism one or more operatively linked promoters (e.g., inducible or regulable promoters) into a region upstream of an endogenous glycogen breakdown protein coding sequence, and/or introducing one or more polynucleotides encoding a glycogen breakdown protein, or a fragment or variant thereof. Exemplary glycogen breakdown proteins include any one or more of glycogen phosphorylase (GlgP), glycogen isoamylase (GlgX), glucanotransferase (MalQ), phosphoglucomutase (Pgm), glucokinase (Glk), and/or phosphoglucose isomerase (Pgi), including any combination thereof.

[0420] Particular embodiments include methods of producing a modified photosynthetic microorganism, e.g., a Cyanobacteria, comprising: (1) introducing into said photosynthetic microorganism one or more polynucleotides encoding one or more intracellular localization domain-DGAT fusion proteins, (2) introducing into said photosynthetic microorganism one or more operatively linked promoters (e.g., inducible or regulable promoters) into a region upstream of an endogenous lipid biosynthesis protein coding sequence, and/or introducing one or more polynucleotides encoding a lipid biosynthesis protein, or a fragment or variant thereof, and (3) introducing into said photosynthetic microorganism one or more operatively linked promoters (e.g., inducible or regulable promoters) into a region upstream of an endogenous glycogen breakdown protein coding sequence, and/or introducing one or more polynucleotides encoding a glycogen breakdown protein, or a fragment or variant thereof.

[0421] In particular embodiments, the lipid biosynthesis protein is an acyl carrier protein (ACP), an acyl-ACP synthetase (Aas), or both. For instance, certain embodiments include methods for producing a modified photosynthetic microorganism, e.g., a Cyanobacteria, comprising: (1) introducing into said photosynthetic microorganism one or more polynucleotides encoding one or more intracellular localization domain-DGAT fusion proteins, (2) introducing into said photosynthetic microorganism one or more operatively linked promoters (e.g., inducible or regulable promoters) into a region upstream of an endogenous ACP coding sequence, and/or introducing one or more polynucleotides encoding an ACP, or a fragment or variant thereof. These and related methods can further comprise (3) introducing into said photosynthetic microorganism one or more operatively linked promoters (e.g., inducible or regulable promoters) into a region upstream of an endogenous TES, ACCase, TAG hydrolase, fatty acyl CoA synthetase, PAP, and/or phospholipase coding sequence, and/or introducing one or more polynucleotides encoding TES, ACCase, TAG hydrolase, fatty acyl CoA synthetase, PAP, and/or phospholipase, or a fragment or variant thereof.

[0422] Some embodiments include methods for producing a modified photosynthetic microorganism, e.g., a Cyanobacteria, comprising: (1) introducing into said photosynthetic microorganism one or more polynucleotides encoding one or more intracellular localization domain-DGAT fusion proteins, (2) introducing into said photosynthetic microorganism one or more operatively linked promoters (e.g., inducible or regulable promoters) into a region upstream of an endogenous Aas coding sequence, and/or introducing one or more polynucleotides encoding an Aas polypeptide, or a fragment or variant thereof. These and related methods can further comprise (3) introducing into said photosynthetic microorganism one or more operatively linked promoters (e.g., inducible or regulable promoters) into a region upstream of an endogenous TES, ACCase, TAG hydrolase, fatty acyl CoA synthetase, PAP, and/or phospholipase coding sequence, and/or introducing one or more polynucleotides encoding TES, ACCase, TAG hydrolase, fatty acyl CoA synthetase, PAP, and/or phospholipase, or a fragment or variant thereof.

[0423] Specific embodiments include methods of producing a modified photosynthetic microorganism, e.g., a Cyanobacteria, comprising: (1) introducing into said photosynthetic microorganism one or more polynucleotides encoding one or more intracellular localization domain-DGAT fusion proteins, (2) introducing into said photosynthetic microorganism one or more operatively linked promoters (e.g., inducible or regulable promoters) into a region upstream of an endogenous ACP coding sequence, and/or introducing one or more polynucleotides encoding an ACP, or a fragment or variant thereof, and (3) introducing into said photosynthetic microorganism one or more operatively linked promoters (e.g., inducible or regulable promoters) into a region upstream of an endogenous Aas coding sequence, and/or introducing one or more polynucleotides encoding an Aas polypeptide, or a fragment or variant thereof. These and related methods can further comprise (4) introducing into said photosynthetic microorganism one or more operatively linked promoters (e.g., inducible or regulable promoters) into a region upstream of an endogenous TES, ACCase, TAG hydrolase, fatty acyl CoA synthetase, PAP, and/or phospholipase coding sequence, and/or introducing one or more polynucleotides encoding TES, ACCase, TAG hydrolase, fatty acyl CoA synthetase, PAP, and/or phospholipase, or a fragment or variant thereof.

[0424] In some embodiments, the lipid biosynthesis protein is an acyl-ACP reductase, optionally in combination with an overexpressed alcohol dehydrogenase, for instance, to increase production of triglycerides and/or produce wax esters. Certain embodiments thus include methods of producing a modified photosynthetic microorganism, e.g., a Cyanobacteria, comprising: (1) introducing into said photosynthetic microorganism one or more polynucleotides encoding one or more intracellular localization domain-DGAT fusion proteins, and (2) introducing into said photosynthetic microorganism one or more operatively linked promoters (e.g., inducible or regulable promoters) into a region upstream of an endogenous acyl-ACP reductase coding sequence, and/or introducing one or more polynucleotides encoding an acyl-ACP reductase, or a fragment or variant thereof.

[0425] For wax ester production, also included are methods of producing a modified photosynthetic microorganism, e.g., a Cyanobacteria, comprising: (1) introducing into said photosynthetic microorganism one or more polynucleotides encoding one or more intracellular localization domain-DGAT fusion proteins, (2) introducing into said photosynthetic microorganism one or more operatively linked promoters (e.g., inducible or regulable promoters) into a region upstream of an endogenous acyl-ACP reductase coding sequence, and/or introducing one or more polynucleotides encoding an acyl-ACP reductase, or a fragment or variant thereof, and (3) introducing into said photosynthetic microorganism one or more operatively linked promoters (e.g., inducible or regulable promoters) into a region upstream of an endogenous alcohol dehydrogenase coding sequence, and/or introducing one or more polynucleotides encoding an alcohol dehydrogenase, or a fragment or variant thereof.

[0426] Any of the photosynthetic microorganisms described herein can be further modified by reducing expression and/or activity of one or more endogenous genes/proteins associated with glycogen synthesis and/or storage, one or more endogenous aldehyde dehydrogenases, one or more endogenous aldehyde decarbonylases, and/or one or more endogenous Aas polypeptides. Exemplary genes/proteins associated with glycogen synthesis and/or storage include glgA, glgC, and pgm.

[0427] In particular embodiments, expression or activity is reduced by knocking out or knocking down one or more alleles of said one or more genes. In particular embodiments, expression or activity of the one or more genes is reduced by contacting the photosynthetic microorganism with an antisense oligonucleotide or interfering RNA, e.g., an siRNA, that targets said one or more genes. In certain embodiments, a vector that expresses a polynucleotide that hybridizes to said one or more genes, e.g., an antisense oligonucleotide or an siRNA is introduced into said photosynthetic microorganism. Also included is the generation of mutants, such as point mutants, insertions, or full or partial deletions of a gene of interest and/or one or more of its regulatory elements (e.g., promoters, enhancers), to reduce expression and/or activity of a protein of interest. Natural selection or directed selection can also be used to identify naturally-occurring mutants having reduced expression and/or activity of a protein of interest.

[0428] For instance, particular embodiments include methods for producing a modified photosynthetic microorganism having reduced expression and/or activity of an aldehyde dehydrogenase, an aldehyde decarbonylase, or both. These and related embodiments may comprise (1) introducing into said photosynthetic microorganism one or more polynucleotides encoding one or more intracellular localization domain-DGAT fusion proteins, and (2) introducing one or more mutations into an endogenous gene encoding an aldehyde dehydrogenase, such as a point mutation, insertion, or full or partial deletion, which reduces expression and/or activity of the aldehyde dehydrogenase, e.g., renders the aldehyde dehydrogenase “non-functional,” as described herein. Also included are methods for producing a modified photosynthetic microorganism, comprising (1) introducing into said photosynthetic microorganism one or more polynucleotides encoding one or more intracellular localization domain-DGAT fusion proteins, and (2) introducing one or more mutations into an endogenous gene encoding an aldehyde decarbonylase, such as a point mutation, insertion, or full or partial deletion, which reduces expression and/or activity of the aldehyde decarbonylase.

[0429] Some embodiments include methods for producing a modified photosynthetic microorganism, comprising (1) introducing into said photosynthetic microorganism one or more polynucleotides encoding one or more intracellular localization domain-DGAT fusion proteins, (2) introducing one or more mutations into an endogenous gene encoding an aldehyde dehydrogenase, such as a point mutation, insertion, or full or partial deletion, which reduces expression and/or activity of the aldehyde dehydrogenase, and (3) introducing one or more mutations into an endogenous gene encoding an aldehyde decarbonylase, such as a point mutation, insertion, or full or partial deletion, which reduces expression and/or activity of the aldehyde decarbonylase.

[0430] Particular methods include producing a modified photosynthetic microorganism having increased expression of an acyl-ACP reductase and an alcohol dehydrogenase, in combination with reduced expression and/or activity of an aldehyde dehydrogenase, reduced expression and/or activity of an aldehyde decarbonylase, or both. These and related embodiments can be useful in the production of wax esters, as described herein. Some embodiments thus include methods for producing a modified photosynthetic microorganism, comprising (1) introducing into said photosynthetic microorganism one or more polynucleotides encoding one or more intracellular localization domain-DGAT fusion proteins, (2) introducing into said photosynthetic microorganism one or more operatively linked promoters (e.g., inducible or regulable promoters) into a region upstream of an endogenous acyl-ACP reductase coding sequence, and/or introducing one or more polynucleotides encoding an acyl-ACP reductase, or a fragment or variant thereof, (3) introducing into said photosynthetic microorganism one or more operatively linked promoters (e.g., inducible or regulable promoters) into a region upstream of an endogenous alcohol dehydrogenase coding sequence, and/or introducing one or more polynucleotides encoding an alcohol dehydrogenase, or a fragment or variant thereof, and either or both of (4) introducing one or more mutations into an endogenous gene encoding an aldehyde dehydrogenase, such as a point mutation, insertion, or full or partial deletion, which reduces expression and/or activity of the aldehyde dehydrogenase, and (5) introducing one or more mutations into an endogenous gene encoding an aldehyde decarbonylase, such as a point mutation, insertion, or full or partial deletion, which reduces expression and/or activity of the aldehyde decarbonylase. In specific embodiments, for instance, where the photosynthetic microorganism is S. elongatus, the aldehyde dehydrogenase is encoded by orf0489, and the aldehyde decarbonylase is encoded by orf1593.

[0431] Photosynthetic microorganisms, e.g., Cyanobacteria, may be genetically modified according to techniques known in the art, e.g., delete a portion or all of a gene or to introduce a polynucleotide that expresses a functional polypeptide. As noted above, in certain aspects, genetic manipulation in photosynthetic microorganisms, e.g., Cyanobacteria, can be performed by the introduction of non-replicating vectors which contain native photosynthetic microorganism sequences, exogenous genes of interest, and selectable markers or drug resistance genes. Upon introduction into the photosynthetic microorganism, the vectors may be integrated into the photosynthetic microorganism's genome through homologous recombination. In this way, an exogenous gene of interest and the drug resistance gene are stably integrated into the photosynthetic microorganism's genome. Such recombinants cells can then be isolated from non-recombinant cells by drug selection. Cell transformation methods and selectable markers for Cyanobacteria are also well known in the art (see, e.g., Wirth, MoI Gen Genet 216:175-7, 1989; and Koksharova, Appl Microbiol Biotechnol 58:123-37, 2002; and The Cyanobacteria: Molecular Biology, Genetics, and Evolution (eds. Antonio Herrera and Enrique Flores) Caister Academic Press, 2008, each of which is incorporated by reference for their description on gene transfer into Cyanobacteria, and other information on Cyanobacteria).

[0432] In certain embodiments, an endogenous version of a protein (e.g., ACP, Aas, TES, ACCase, TAG hydrolase, fatty acyl-CoA synthetase, PAP, PL), if present, can be overexpressed by introducing a heterologous or other promoter upstream of the endogenous gene encoding that protein, i.e., the naturally-occurring version of that gene. Such promoters may be constitutive or inducible.

[0433] Generation of deletions or mutations of any of the one or more genes associated with the biosynthesis or storage of glycogen can be accomplished according to a variety of methods known in the art, including the use of a non-replicating, selectable vector system that is targeted to the upstream and downstream flanking regions of a given gene (e.g., glgC, pgm), and which recombines with the Cyanobacterial genome at those flanking regions to replace the endogenous coding sequence with the vector sequence. Given the presence of a selectable marker in the vector sequence, such as a drug selectable marker, Cyanobacterial cells containing the gene deletion can be readily isolated, identified and characterized. Such selectable vector-based recombination methods need not be limited to targeting upstream and downstream flanking regions, but may also be targeted to internal sequences within a given gene, as long as that gene is rendered “non-functional,” as described herein.

[0434] The generation of deletions or mutations can also be accomplished using antisense-based technology. For instance, Cyanobacteria have been shown to contain natural regulatory events that rely on antisense regulation, such as a 177-nt ncRNA that is transcribed in antisense to the central portion of an iron-regulated transcript and blocks its accumulation through extensive base pairing (see, e.g., Dühring, et al., Proc. Natl. Acad. Sci. USA 103:7054-7058, 2006), as well as a alr1690 mRNA that overlaps with, and is complementary to, the complete furA gene, which acts as an antisense RNA (a furARNA) interfering with furA transcript translation (see, e.g., Hernandez et al., Journal of Molecular Biology 355:325-334, 2006). Thus, the incorporation of antisense molecules targeted to genes involved in glycogen biosynthesis or storage would be similarly expected to negatively regulate the expression of these genes, rendering them “non-functional,” as described herein.

[0435] As used herein, antisense molecules encompass both single and double-stranded polynucleotides comprising a strand having a sequence that is complementary to a target coding strand of a gene or mRNA. Thus, antisense molecules include both single-stranded antisense oligonucleotides and double-stranded siRNA molecules.

[0436] Other modifications described herein may be produced using standard procedures and reagents, e.g., vectors, available in the art. Related methods are described in PCT Application No. WO 2010/075440, which is hereby incorporated by reference in its entirety.

### F. METHODS OF PRODUCING LIPIDS

[0437] The modified photosynthetic microorganisms and methods of the present invention may be used to produce lipids, such as fatty acids, triglycerides, and/or wax esters. Accordingly, the present invention provides methods of producing lipids, comprising culturing any of the modified photosynthetic microorganisms of the present invention (described elsewhere herein)

[0438] In one embodiment, the modified photosynthetic microorganism is a Cyanobacterium that produces or accumulates increased lipids relative to an unmodified or wild-type Cyanobacterium of the same species, or a differently modified Cyanobacterium of the same species. In certain embodiments, the modified photosynthetic microorganism is a Cyanobacterium that produces or accumulates increased triglycerides relative to an unmodified or wild-type Cyanobacterium of the same species, or a differently modified Cyanobacterium of the same species. In specific instances, the differently modified Cyanobacterium expresses a wild-type DGAT, and no other form(s) of DGAT. Other examples of differently modified Cyanobacteria are described herein. In certain aspects, increased triglyceride production is associated with improved cell growth characteristics relative to the differently modified Cyanobacterium, e.g., increased cell survival over time, and is thus measured over time, e.g., 2, 3, 4, 5, 6, 7, 8, 9, 10, 11, 12, 13, 14, or more days post-culture or post-induction of DGAT expression, or in a continuous culture system.

[0439] In one embodiment, the modified photosynthetic microorganism is a Cyanobacterium that produces or accumulates increased wax esters relative to an unmodified or wild-type Cyanobacterium of the same species, or a differently modified Cyanobacterium of the same species. In these and related embodiments, the Cyanobacterium overexpresses an acyl-ACP reductase and an alcohol dehydrogenase, in combination with an intracellular localization domain-DGAT fusion protein. In some embodiments, the differently modified Cyanobacterium is one that expresses DGAT in combination with an acyl-ACP reductase and an alcohol dehydrogenase, and thus produces wax esters, but expresses a wild-type DGAT and no other form of DGAT. In some aspects, increased wax ester production is associated with improved cell growth characteristics relative to the differently modified Cyanobacterium, e.g., increased cell survival over time, and is thus measured over time, e.g., 2, 3, 4, 5, 6, 7, 8, 9, 10, 11, 12, 13, 14, or more days post-culture or post-induction of DGAT expression, or in a continuous culture system.

[0440] In certain embodiments, the one or more introduced polynucleotides are present in one or more expression constructs. In particular embodiments, the one or more expression constructs comprises one or more inducible promoters. In certain embodiments, the one or more expression constructs are stably integrated into the genome of said modified photosynthetic microorganism.

[0441] In certain embodiments, the introduced polynucleotide encoding an introduced protein is present in an expression construct comprising a weak promoter under non-induced conditions. In certain embodiments, one or more of the introduced polynucleotides are codon-optimized for expression in a Cyanobacterium, e.g., a Synechococcus elongatus.

[0442] In particular embodiments, the photosynthetic microorganism is a Synechococcus elongatus, such as Synechococcus elongatus strain PCC7942 or a salt tolerant variant of Synechococcus elongatus strain PCC7942. In particular embodiments, the photosynthetic microorganism is a Synechococcus sp. PCC 7002 or a Synechocystis sp. PCC6803.

[0443] Photosynthetic microorganisms may be cultured according to techniques known in the art. For example, Cyanobacteria may be cultured or cultivated according to techniques known in the art, such as those described in Acreman et al. (Journal of Industrial Microbiology and Biotechnology 13:193-194, 1994), in addition to photobioreactor based techniques, such as those described in Nedbal et al. (Biotechnol Bioeng. 100:902-10, 2008). One example of typical laboratory culture conditions for Cyanobacterium is growth in BG-11 medium (ATCC Medium 616) at 30° C. in a vented culture flask with constant agitation and constant illumination at 30-100 μmole photons M⁻² sec⁻¹.

[0444] A wide variety of mediums are available for culturing Cyanobacteria, including, for example, Aiba and Ogawa (AO) Medium, Allen and Amon Medium plus Nitrate (ATCC Medium 1142), Antia's (ANT) Medium, Aquil Medium, Ashbey's Nitrogen-free Agar, ASN-III Medium, ASP 2 Medium, ASW Medium (Artificial Seawater and derivatives), ATCC Medium 617 (BG-11 for Marine Blue-Green Algae; Modified ATCC Medium 616 [BG-11 medium]), ATCC Medium 819 (Blue-green Nitrogen-fixing Medium; ATCC Medium 616 [BG-11 medium] without NO₃), ATCC Medium 854 (ATCC Medium 616 [BG-11 medium] with Vitamin B₁₂), ATCC Medium 1047 (ATCC Medium 957 [MN marine medium] with Vitamin B₁₂), ATCC Medium 1077 (Nitrogen-fixing marine medium; ATCC Medium 957 [MN marine medium] without NO₃), ATCC Medium 1234 (BG-11 Uracil medium; ATCC Medium 616 [BG-11 medium] with uracil), Beggiatoa Medium (ATCC Medium 138), Beggiatoa Medium 2 (ATCC Medium 1193), BG-11 Medium for Blue Green Algae (ATCC Medium 616), Blue-Green (BG) Medium, Bold's Basal (BB) Medium, Castenholtz D Medium, Castenholtz D Medium Modified (Halophilic cyanobacteria), Castenholtz DG Medium, Castenholtz DGN Medium, Castenholtz ND Medium, Chloroflexus Broth, Chloroflexus Medium (ATCC Medium 920), Chu's #10 Medium (ATCC Medium 341), Chu's #10 Medium Modified, Chu's #11 Medium Modified, DCM Medium, DYIV Medium, E27 Medium, E31 Medium and Derivatives, f/2 Medium, f/2 Medium Derivatives, Fraquil Medium (Freshwater Trace Metal-Buffered Medium), Gorham's Medium for Algae (ATCC Medium 625), h/2 Medium, Jaworski's (JM) Medium, K Medium, L1 Medium and Derivatives, MN Marine Medium (ATCC Medium 957), Plymouth Erdschreiber (PE) Medium, Prochlorococcus PC Medium, Proteose Peptone (PP) Medium, Prov Medium, Prov Medium Derivatives, S77 plus Vitamins Medium, S88 plus Vitamins Medium, Saltwater Nutrient Agar (SNA) Medium and Derivatives, SES Medium, SN Medium, Modified SN Medium, SNAX Medium, Soil/Water Biphasic (S/W) Medium and Derivatives, SOT Medium for Spirulina: ATCC Medium 1679, Spirulina (SP) Medium, van Rijn and Cohen (RC) Medium, Walsby's Medium, Yopp Medium, and Z8 Medium, among others.

[0445] In particular embodiments, the modified photosynthetic microorganisms are cultured under conditions suitable for inducing expression of the introduced polynucleotide(s), e.g., wherein the introduced polynucleotide(s) comprise an inducible promoter. Conditions and reagents suitable for inducing inducible promoters are known and available in the art. Also included are the use of auto-inductive systems, for example, where a metabolite represses expression of the introduced polynucleotide, and the use of that metabolite by the microorganism over time decreases its concentration and thus its repressive activities, thereby allowing increased expression of the polynucleotide sequence.

[0446] In certain embodiments, modified photosynthetic microorganisms, e.g., Cyanobacteria, are grown under conditions favorable for producing lipids, triglycerides and/or fatty acids. In particular embodiments, light intensity is between 100 and 2000 uE/m2/s, or between 200 and 1000 uE/m2/s. In particular embodiments, the pH range of culture media is between 7.0 and 10.0. In certain embodiments, CO₂ is injected into the culture apparatus to a level in the range of 1% to 10%. In particular embodiments, the range of CO₂ is between 2.5% and 5%. In certain embodiments, nutrient supplementation is performed during the linear phase of growth. Each of these conditions may be desirable for triglyceride production.

[0447] In certain embodiments, the modified photosynthetic microorganisms are cultured, at least for some time, under static growth conditions as opposed to shaking conditions. For example, the modified photosynthetic microorganisms may be cultured under static conditions prior to inducing expression of an introduced polynucleotide (e.g., intracellular localization domain-DGAT fusion, acyl-ACP reductase, ACP, Aas, ACP/Aas, glycogen breakdown protein, ACCase, DGAT, fatty acyl-CoA synthetase, aldehyde dehydrogenase, alcohol dehydrogenase) and/or the modified photosynthetic microorganism may be cultured under static conditions while expression of an introduced polynucleotide is being induced, or during a portion of the time period during which expression on an introduced polynucleotide is being induced. Static growth conditions may be defined, for example, as growth without shaking or growth wherein the cells are shaken at less than or equal to 30 rpm or less than or equal to 50 rpm.

[0448] In certain embodiments, the modified photosynthetic microorganisms are cultured, at least for some time, in media supplemented with varying amounts of bicarbonate. For example, the modified photosynthetic microorganisms may be cultured with bicarbonate at 5, 10, 20, 50, 75, 100, 200, 300, 400, 500, 600, 700, 800, 900, 1000 mM bicarbonate prior to inducing expression of an introduced polynucleotide (e.g., membrane-targeting domain-DGAT fusion protein, acyl-ACP reductase, aldehyde dehydrogenase, ACP, Aas, ACP/Aas, glycogen breakdown protein, ACCase, DGAT, fatty acyl-CoA synthetase, alcohol dehydrogenase) and/or the modified photosynthetic microorganism may be cultured with aforementioned bicarbonate concentrations while expression of an introduced polynucleotide is being induced, or during a portion of the time period during which expression on an introduced polynucleotide is being induced.

[0449] In related embodiments, modified photosynthetic organisms and methods of the present invention may be used in the production of a biofuel and/or a specialty chemical, such as glycerin or a wax ester. Thus, in particular embodiments, a method of producing a biofuel comprises culturing any of the modified photosynthetic microorganisms of the present invention under conditions wherein the modified photosynthetic microorganism accumulates an increased amount of total cellular lipid, fatty acid, wax ester, and/or triglyceride, as compared to a corresponding wild-type photosynthetic microorganism, obtaining cellular lipid, fatty acid, wax ester, and/or triglyceride from said microorganism, and processing the obtained cellular lipid, fatty acid, wax ester, and/or triglyceride to produce a biofuel. In another embodiment, a method of producing a biofuel comprises processing lipids, fatty acids, wax esters, and/or triglycerides produced by a modified photosynthetic microorganism of the present invention to produce a biofuel. In a further embodiment, a method of producing a biofuel comprises obtaining lipid, fatty acid, wax esters, and/or triglyceride produced by a modified photosynthetic microorganism of the present invention, and processing the obtained cellular lipid, fatty acid, wax ester, and/or triglyceride to produce a biofuel. In particular embodiments, the modified photosynthetic organism is grown under conditions wherein it has reduced growth but maintains photosynthesis.

[0450] Methods of processing lipids from microorganisms to produce a biofuel or specialty chemical, e.g., biodiesel, are known and available in the art. For example, triglycerides may be transesterified to produce biodiesel. Transesterification may be carried out by any one of the methods known in the art, such as alkali-, acid-, or lipase-catalysis (see, e.g., Singh et al., Recent Pat Biotechnol. 2008, 2(2):130-143). Various methods of transesterification utilize, for example, use of a batch reactor, a supercritical alcohol, an ultrasonic reactor, or microwave irradiation (Such methods are described, e.g., in Jeong and Park, Appl Biochem Biotechnol. 2006, 131(1-3):668-679; Fukuda et al., Journal of Bioscience and Engineering. 2001, 92(5):405-416; Shah and Gupta, Chemistry Central Journal. 2008, 2(1):1-9; and Carrillo-Munoz et al., J Org Chem. 1996, 61(22):7746-7749). The biodiesel may be further processed or purified, e.g., by distillation, and/or a biodiesel stabilizer may be added to the biodiesel, as described in U.S. Patent Application Publication No. 2008/0282606.

[0451] Certain embodiments of the present invention now will be illustrated by the following Examples. The present invention may, however, be embodied in many different forms and should not be construed as limited to the embodiments set forth herein; rather, these embodiments are provided so that this disclosure will be thorough and complete, and will fully convey the scope of the invention to those skilled in the art.

### EXAMPLES

### Example 1

### Expression and Activity of DGAT Fused to a Heterologous Intracellular Targeting Domain

[0452] A number of fusion proteins were generated to test the impact of a defined heterologous intracellular targeting domain sequence fused to the N-terminus of Acinetobacter diacylglycerol acyltransferase (ADGAT) on cell growth and lipid production in Cyanobacteria. First, SS-ADGAT fusions were achieved by appending the N-terminus of ADGAT to the N-terminal signal sequence derived from methyl-accepting chemotaxis protein PCC7942_{—}0858 from S. elongatus (see FIG. 1 for the domain orientation of PCC7942_{—}0858).

[0453] The ATG start codon from ADGAT was eliminated and the N-terminal signal (SS)-containing sequence from PCC7942_{—}0858 was fused to the N-terminus of ADGAT: (i) the N-terminal 129 nucleotides (SS, SEQ ID NO: 213), (ii) the N-terminal 144 nucleotides (SS15, SEQ ID NO: 214), or (iii) the N-terminal 159 nucleotides (SS30, SEQ ID NO: 215) of PCC7942_{—}0858 (see FIG. 2 for the domain orientation of the membrane-targeting domain-DGAT fusion proteins). The SS15 and SS30 sequences contain extra nucleotides from PCC7942_{—}0858, to provide for greater flexibility by DGAT at the membrane if needed. The DGAT used in these studies is a C-terminal modified form of ADGAT fused in frame with green fluorescent protein (GFP).

[0454] Each of the SS-ADGAT-GFP fusion proteins was cloned into an IPTG-inducible Ptrc NS 1 vector. S. elongatus transformants for each fusion protein and controls were isolated and expanded in liquid culture prior to induction with IPTG, and then analyzed for GFP expression, cell growth, and triacylglycerol (TAG) production.

[0455] As shown in FIG. 3, induction of ADGAT resulted in an increase in GFP fluorescence indicative of fusion protein expression, although the level of GFP fluorescence of SS-ADGAT-GFP was slightly lower than that observed for ADGAT-GFP. As shown in FIG. 4, expression of SS-DGAT fusion proteins (SS-ADGAT-GFP, SS15-ADGAT-GFP, SS30-ADGAT-GFP) significantly improved the growth phenotype of S. elongatus transformants over a period of at least 168 hours, relative to expression of ADGAT (ADGAT-GFP). As shown in FIG. 5, all SS-ADGAT-expressing strains retain the ability to produce TAG.

[0456] The SS-ADGAT-GFP fusion protein constructs and controls were then transformed into S. elongatus modified to overexpress acyl carrier protein (ACP) (see U.S. Application No. 61/425,179; and PCT/US2011/065938, incorporated by reference). As above, transformants for each fusion protein and controls were isolated and expanded in liquid culture prior to induction with IPTG, and then analyzed for GFP expression, cell growth, and triacylglycerol (TAG) production. Similar to above, FIG. 6 shows that the SS30-ADGAT fusion protein (SS30-ADGAT-GFP) significantly improved the growth phenotype of ACP-overexpressing S. elongatus transformants over a period of at least 168 hours, relative to expression of ADGAT (ADGAT-GFP). FIG. 7 shows that the SS30-ADGAT-GFP expressing strains retain the ability to produce high-levels of TAG when combined with overexpression of ACP.

[0457] Second, three additional ADGAT fusion proteins were generated to compare the contributions of N-terminal signal sequence and transmembrane domain (TMD) sequences to cell growth and lipid production in Cyanobacteria: iv) the N-terminal signal-containing sequence (SS30, SEQ ID NO: 215) was fused to ADGAT (SS30-ADGAT), v) the N-terminal signal-containing sequence (SS48) plus two transmembrane domain (TMD)-containing sequences were fused to ADGAT (SS48-TMD-ADGAT), or vi) the TMD-containing sequences were fused to ADGAT (TMD-ADGAT). The SS- and TMD-containing sequences are from methyl-accepting chemotaxis protein PCC7942_{—}0858 from S. elongatus (see FIG. 1 for the domain orientation of PCC7942_{—}0858).

[0458] The SS30-ADGAT was as described above except that GFP was not fused to the C-terminus of ADGAT. For SS48-TMD-ADGAT, the ATG start codon from ADGAT was eliminated and the N-terminal signal-containing sequence (SS48) plus two TMD-containing sequences (SEQ ID NO 211) from PCC7942_{—}0858 was fused to the N-terminus of ADGAT. The SS48-TMD sequence contains amino acids 1-136 of SEQ ID NO: 199. For TMD-ADGAT, the ATG start codon from ADGAT was eliminated and an initiator methionine followed by the two TMD-containing sequences (SEQ ID NO 212) from PCC7942_{—}0858 was fused to the N-terminus of ADGAT. The TMD sequence contains methionine at amino acid position one followed by amino acids 60-142 of SEQ ID NO: 199. See FIG. 8 for the domain orientation of the membrane-targeting domain-DGAT fusion proteins.

[0459] Each of the SS30-ADGAT, SS48-TMD-ADGAT and TMD-ADGAT fusion proteins was cloned into an IPTG-inducible Ptrc NS1 vector. The SS30-ADGAT, SS48-TMD-ADGAT and TMD-DGAT fusion protein constructs, along with controls, were transformed into S. elongatus modified to overexpress acyl carrier protein (ACP) (see U.S. Application No. 61/425,179; and PCT/US2011/065938, incorporated by reference). Transformants for each fusion protein and control were isolated and expanded in liquid culture prior to induction with IPTG, and then analyzed for cell growth and triacylglycerol (TAG) production.

[0460] FIG. 9 shows that all ADGAT fusion proteins (SS30-ADGAT, SS48-TMD-ADGAT, TMD-ADGAT) significantly improved the growth phenotype of ACP-overexpressing S. elongatus transformants over a period of at least 89 hours, relative to expression of ADGAT. FIGS. 10 and 11 show that, 48 and 72 hours post-induction, respectively, the SS30-ADGAT-expressing strain retains the ability to produce high-levels of TAG when combined with overexpression of ACP, similar to what was seen above for SS30-ADGAT-GFP. The SS48-TMD-ADGAT and TMD-ADGAT expressing strains produced TAG when combined with overexpression of ACP, but the TAG level was not as high as seen for the SS30-ADGAT fusion strain.

[0461] Overall, these data indicate that the N-terminal modification of DGAT with a bacterial N-terminal signal-containing sequence, a bacterial N-terminal signal-containing sequence and transmembrane domain-containing sequences, or only transmembrane domain-containing sequences reduce the adverse growth phenotype that is sometimes associated with DGAT expression in Cyanobacteria, while retaining the enzymatic activity required for TAG and wax ester (WE) production. Among other possibilities described herein, these observations suggest that any membrane-targeting sequence(s) derived from a bacterial membrane protein that allows targeting of DGAT to a membrane would be sufficient to improve the growth characteristics of a photosynthetic microorganism, such as a photosynthetic bacteria (e.g., Cyanobacteria). The combination of improved growth characteristics and robust lipid production is achieved with a bacterial N-terminal signal sequence fused to the N-terminus of DGAT.

The application's sequence listing, which the Patent Office published only in electronic form, follows.

SEQUENCE LISTING (215 sequences)

SEQ ID NO: 1 - DNA, 1026 bp, Synechococcus elongatus
atgttcggtcttatcggtcatctcaccagtttggagcaggcccgcgacgtttctcgcaggatgggctacgacgaatacgccgatcaaggattggagttttggagtagcgctcctcctcaaatcgttgatgaaatcacagtcaccagtgccacaggcaaggtgattcacggtcgctacatcgaatcgtgtttcttgccggaaatgctggcggcgcgccgcttcaaaacagccacgcgcaaagttctcaatgccatgtcccatgcccaaaaacacggcatcgacatctcggccttggggggctttacctcgattattttcgagaatttcgatttggccagtttgcggcaagtgcgcgacactaccttggagtttgaacggttcaccaccggcaatactcacacggcctacgtaatctgtagacaggtggaagccgctgctaaaacgctgggcatcgacattacccaagcgacagtagcggttgtcggcgcgactggcgatatcggtagcgctgtctgccgctggctcgacctcaaactgggtgtcggtgatttgatcctgacggcgcgcaatcaggagcgtttggataacctgcaggctgaactcggccggggcaagattctgcccttggaagccgctctgccggaagctgactttatcgtgtgggtcgccagtatgcctcagggcgtagtgatcgacccagcaaccctgaagcaaccctgcgtcctaatcgacgggggctaccccaaaaacttgggcagcaaagtccaaggtgagggcatctatgtcctcaatggcggggtagttgaacattgcttcgacatcgactggcagatcatgtccgctgcagagatggcgcggcccgagcgccagatgtttgcctgctttgccgaggcgatgctcttggaatttgaaggctggcatactaacttctcctggggccgcaaccaaatcacgatcgagaagatggaagcgatcggtgaggcatcggtgcgccacggcttccaacccttggcattggcaatttga

SEQ ID NO: 2 - protein, 341 aa, Synechococcus elongatus
MFGLIGHLTSLEQARDVSRRMGYDEYADQGLEFWSSAPPQIVDEITVTSATGKVIHGRYIESCFLPEMLAARRFKTATRKVLNAMSHAQKHGIDISALGGFTSIIFENFDLASLRQVRDTTLEFERFTTGNTHTAYVICRQVEAAAKTLGIDITQATVAVVGATGDIGSAVCRWLDLKLGVGDLILTARNQERLDNLQAELGRGKILPLEAALPEADFIVWVASMPQGVVIDPATLKQPCVLIDGGYPKNLGSKVQGEGIYVLNGGVVEHCFDIDWQIMSAAEMARPERQMFACFAEAMLLEFEGWHTNFSWGRNQITIEKMEAIGEASVRHGFQPLALAI

SEQ ID NO: 3 - DNA, 1023 bp, Synechocystis sp.
atgtttggtcttattggtcatctcacgagtttagaacacgcccaagcggttgctgaagatttaggctatcctgagtacgccaaccaaggcctggatttttggtgttcggctcctccccaagtggttgataattttcaggtgaaaagtgtgacggggcaggtgattgaaggcaaatatgtggagtcttgctttttgccggaaatgttaacccaacggcggatcaaagcggccattcgtaaaatcctcaatgctatggccctggcccaaaaggtgggcttggatattacggccctgggaggcttttcttcaatcgtatttgaagaatttaacctcaagcaaaataatcaagtccgcaatgtggaactagattttcagcggttcaccactggtaatacccacaccgcttatgtgatctgccgtcaggtcgagtctggagctaaacagttgggtattgatctaagtcaggcaacggtagcggtttgtggcgccacgggagatattggtagcgccgtatgtcgttggttagatagcaaacatcaagttaaggaattattgctaattgcccgtaaccgccaaagattggaaaatctccaagaggaattgggtcggggcaaaattatggatttggaaacagccctgccccaggcagatattattgtttgggtggctagtatgcccaagggggtagaaattgcgggggaaatgctgaaaaagccctgtttgattgtggatgggggctatcccaagaatttagacaccagggtgaaagcggatggggtgcatattctcaagggggggattgtagaacattcccttgatattacctgggaaattatgaagattgtggagatggatattccctcccggcaaatgttcgcctgttttgcggaggccattttgctagagtttgagggctggcgcactaatttttcctggggccgcaaccaaatttccgttaataaaatggaggcgattggtgaagcttctgtcaagcatggcttttgccctttagtagctctttag

SEQ ID NO: 4 - protein, 340 aa, Synechocystis sp.
MFGLIGHLTSLEHAQAVAEDLGYPEYANQGLDFWCSAPPQVVDNFQVKSVTGQVIEGKYVESCFLPEMLTQRRIKAAIRKILNAMALAQKVGLDITALGGFSSIVFEEFNLKQNNQVRNVELDFQRFTTGNTHTAYVICRQVESGAKQLGIDLSQATVAVCGATGDIGSAVCRWLDSKHQVKELLLIARNRQRLENLQEELGRGKIMDLETALPQADIIVWVASMPKGVEIAGEMLKKPCLIVDGGYPKNLDTRVKADGVHILKGGIVEHSLDITWEIMKIVEMDIPSRQMFACFAEAILLEFEGWRTNFSWGRNQISVNKMEAIGEASVKHGFCPLVAL

SEQ ID NO: 5 - DNA, 243 bp, Synechococcus elongatus PCC 7942
atgagccaagaagacatcttcagcaaagtcaaagacattgtggctgagcagctgagtgtggatgtggctgaagtcaagccagaatccagcttccaaaacgatctgggagcggactcgctggacaccgtggaactggtgatggctctggaagaggctttcgatatcgaaatccccgatgaagccgctgaaggcattgcgaccgttcaagacgccgtcgatttcatcgctagcaaagctgcctag

SEQ ID NO: 6 - protein, 80 aa, Synechococcus elongatus PCC 7942
MSQEDIFSKVKDIVAEQLSVDVAEVKPESSFQNDLGADSLDTVELVMALEEAFDIEIPDEAAEGIATVQDAVDFIASKAA

SEQ ID NO: 7 - DNA, 261 bp, Acinetobacter sp. ADP1
atgtcgaacctggcggatgagatcaaacaaatgatcattgacgtcctcgctctcgaggatatccaaatccaggatattgatgaaacggcaccgctgttcggggatggtttgggcctggatagtattgacgcgctcgaactcggcctggccttgaaaaagcgctaccacatccatttgaatgccgaatctgacgaaactaagcagcactttcggtccattcagagcctggtgaccctggtggaggcccaacagaaagcttag

SEQ ID NO: 8 - protein, 86 aa, Acinetobacter sp. ADP1
MSNLADEIKQMIIDVLALEDIQIQDIDETAPLFGDGLGLDSIDALELGLALKKRYHIHLNAESDETKQHFRSIQSLVTLVEAQQKA

SEQ ID NO: 9 - DNA, 246 bp, Acinetobacter sp. ADP1
atgttgagtcaggaacacatcctctccacactccgcgaatggatggaggacttgtttgaaatcgagcctgaaaccattcaactggattctaacctgtactcggacctggatgtggatagcattgatgcggtcgatctgattgtcaagatcaaagagctcacgggcaaacaggtgaaaccggaagacttcaagaatgtccggactgtccatgatgttgtgaccgtgatccaaaacatgacggcttag

SEQ ID NO: 10 - protein, 81 aa, Acinetobacter sp. ADP1
MLSQEHILSTLREWMEDLFEIEPETIQLDSNLYSDLDVDSIDAVDLIVKIKELTGKQVKPEDFKNVRTVHDVVTVIQNMTA

SEQ ID NO: 11 - DNA, 345 bp, Acinetobacter sp. ADP1
atggtcgtctacacgtggccgaaatgtcgttgcattaactttcagaaaatccaatacagcatcaaactgacagcgatcaaaacgcctcgagcaatgcgccgcattcccgtgtctgatattgaacaacgggtgaagcaggccgtggcagaacagctcggcatcaaagccgaagaaatcaagaatgaggcttcgttcatggatgacttgggtgccgacagtctggatctcgtcgagctggtgatgagctttgagaatgattttgatatcaccattccggatgaagactcgaacgagatcactaccgttcaatccgcgattgactacgtgaccaagaagctgggttag

SEQ ID NO: 12 - protein, 114 aa, Acinetobacter sp. ADP1
MVVYTWPKCRCINFQKIQYSIKLTAIKTPRAMRRIPVSDIEQRVKQAVAEQLGIKAEEIKNEASFMDDLGADSLDLVELVMSFENDFDITIPDEDSNEITTVQSAIDYVTKKLG

SEQ ID NO: 13 - DNA, 246 bp, Spinacia oleracea
gcaaagaaggaaacaattgacaaagtgtgcgacattgtaaaggagaaactggctttaggagctgatgttgtggtcacagctgattccgagtttagtaaactcggtgctgattcattggacacggttgagatagtgatgaacctcgaggaagagttcggtatcaatgtggatgaagataaagctcaagatatatcaaccatccaacaagccgccgacgttattgagagtcttcttgagaagaaatag

SEQ ID NO: 14 - protein, 81 aa, Spinacia oleracea
AKKETIDKVCDIVKEKLALGADVVVTADSEFSKLGADSLDTVEIVMNLEEEFGINVDEDKAQDISTIQQAADVIESLLEKK

SEQ ID NO: 15 - protein, 7 aa, Artificial Sequence
  Heptapeptide retention motif
  VARIANT (3)..(3): Xaa = Any Amino Acid
FYXDWWN

SEQ ID NO: 16 - DNA, 1752 bp, Escherichia coli
atgttaacggcatgtatatcatttggggttgcgatgacgacgaacacgcattttagaggtgaagaattgaaaaaagtgtggctcaatcggtatccggcggatgtcccaactgaaatcaaccctgatcgatatcagtccctcgtggacatgtttgaacagagcgtggcacgctacgccgatcagcccgccttcgtgaatatgggcgaggttatgacgtttcggaaattggaagaacgctctcgggcgtttgcggcttatttgcagcagggcctgggcctgaagaaaggtgatcgggtcgccttgatgatgcccaacctcttgcaatacccggtcgccctgtttggaatcctgcgtgctggcatgattgtcgtgaatgtgaatcctctctacacccctcgtgaactcgaacaccagctgaacgatagtggcgcttccgctattgttatcgtgtctaatttcgctcatacgctggagaaggtcgtggacaagacagccgttcaacacgtcattctgacccgcatgggtgatcaactgagtacggcaaaaggtacggtcgtcaattttgtcgtcaaatatatcaaacgtctggtccccaagtaccatctgccagacgcgatttccttccggagtgctttgcataacggatatcgaatgcaatacgtgaaacccgaactggtgcctgaggacctcgcatttctgcagtacacaggtggcaccaccggggtggccaagggtgctatgctgacacatcgaaatatgctcgccaacctcgagcaggtcaacgccacctacggtccgctgttgcacccaggcaaggagctggttgtgacggctttgcccctgtatcatatttttgctctgacgatcaactgcctgctgtttattgagttgggtggtcagaacctcctgatcaccaatccacgcgatattccgggcctcgttaaagaactcgcgaaatacccctttactgcgatcacgggtgttaatactctctttaacgcgctgctcaacaataaggagttccaacagttggacttcagcagcctgcatctctctgccggcggtggcatgcctgtgcaacaagttgttgcggagcgatgggtgaaattgacggggcagtatctgttggaggggtacgggttgaccgaatgcgcacctctggtgtcggtgaacccctacgatattgactaccacagcggatcgatcggcctgccggtgccgtcgacagaagcgaaactggttgacgacgatgataacgaggtgcccccaggccaaccgggggagttgtgtgttaagggaccgcaagtcatgctcgggtactggcagcggccggatgccactgatgaaattatcaagaatggttggctccacaccggggacattgcagttatggatgaagagggattcctgcgcatcgtcgatcgcaaaaaagacatgatcctcgtgtccggctttaatgtctatccaaatgaaatcgaggatgtcgttatgcagcaccctggggtgcaggaggttgccgctgttggcgtgcctagcgggagtagcggcgaagcggtcaaaattttcgttgtcaagaaggaccccagtttgaccgaagagtcgttggtcacgttctgtcgccgccaactgactggatataaagtccccaaactcgtcgaatttcgggatgaattgcccaagtcgaacgtcggcaagatcctccgccgcgagttgcgcgatgaagcacgcggtaaggttgacaataaggcttag

SEQ ID NO: 17 - protein, 583 aa, Escherichia coli
MLTACISFGVAMTTNTHFRGEELKKVWLNRYPADVPTEINPDRYQSLVDMFEQSVARYADQPAFVNMGEVMTFRKLEERSRAFAAYLQQGLGLKKGDRVALMMPNLLQYPVALFGILRAGMIVVNVNPLYTPRELEHQLNDSGASAIVIVSNFAHTLEKVVDKTAVQHVILTRMGDQLSTAKGTVVNFVVKYIKRLVPKYHLPDAISFRSALHNGYRMQYVKPELVPEDLAFLQYTGGTTGVAKGAMLTHRNMLANLEQVNATYGPLLHPGKELVVTALPLYHIFALTINCLLFIELGGQNLLITNPRDIPGLVKELAKYPFTAITGVNTLFNALLNNKEFQQLDFSSLHLSAGGGMPVQQVVAERWVKLTGQYLLEGYGLTECAPLVSVNPYDIDYHSGSIGLPVPSTEAKLVDDDDNEVPPGQPGELCVKGPQVMLGYWQRPDATDEIIKNGWLHTGDIAVMDEEGFLRIVDRKKDMILVSGFNVYPNEIEDVVMQHPGVQEVAAVGVPSGSSGEAVKIFVVKKDPSLTEESLVTFCRRQLTGYKVPKLVEFRDELPKSNVGKILRRELRDEARGKVDNKA

SEQ ID NO: 18 - DNA, 2103 bp, Saccharomyces cerevisiae S288c
atggttgctcaatataccgttccagttgggaaagccgccaatgagcatgaaactgctccaagaagaaattatcaatgccgcgagaagccgctcgtcagaccgcctaacacaaagtgttccactgtttatgagtttgttctagagtgctttcagaagaacaaaaattcaaatgctatgggttggagggatgttaaggaaattcatgaagaatccaaatcggttatgaaaaaagttgatggcaaggagacttcagtggaaaagaaatggatgtattatgaactatcgcattatcattataattcatttgaccaattgaccgatatcatgcatgaaattggtcgtgggttggtgaaaataggattaaagcctaatgatgatgacaaattacatctttacgcagccacttctcacaagtggatgaagatgttcttaggagcgcagtctcaaggtattcctgtcgtcactgcctacgatactttgggagagaaagggctaattcattctttggtgcaaacggggtctaaggccatttttaccgataactctttattaccatccttgatcaaaccagtgcaagccgctcaagacgtaaaatacataattcatttcgattccatcagttctgaggacaggaggcaaagtggtaagatctatcaatctgctcatgatgccatcaacagaattaaagaagttagacctgatatcaagacctttagctttgacgacatcttgaagctaggtaaagaatcctgtaacgaaatcgatgttcatccacctggcaaggatgatctttgttgcatcatgtatacgtctggttctacaggtgagccaaagggtgttgtcttgaaacattcaaatgttgtcgcaggtgttggtggtgcaagtttgaatgttttgaagtttgtgggcaataccgaccgtgttatctgttttttgccactagctcatatttttgaattggttttcgaactattgtccttttattggggggcctgcattggttatgccaccgtaaaaactttaactagcagctctgtgagaaattgtcaaggtgatttgcaagaattcaagcccacaatcatggttggtgtcgccgctgtttgggaaacagtgagaaaagggatcttaaaccaaattgataatttgcccttcctcaccaagaaaatcttctggaccgcgtataataccaagttgaacatgcaacgtctccacatccctggtggcggcgccttaggaaacttggttttcaaaaaaatcagaactgccacaggtggccaattaagatatttgttaaacggtggttctccaatcagtcgggatgctcaggaattcatcacaaatttaatctgccctatgcttattggttacggtttaaccgagacatgcgctagtaccaccatcttggatcctgctaattttgaactcggcgtcgctggtgacctaacaggttgtgttaccgtcaaactagttgatgttgaagaattaggttattttgctaaaaacaaccaaggtgaagtttggatcacaggtgccaatgtcacgcctgaatattataagaatgaggaagaaacttctcaagctttaacaagcgatggttggttcaagaccggtgacatcggtgaatgggaagcaaatggccatttgaaaataattgacaggaagaaaaacttggtcaaaacaatgaacggtgaatatatcgcactcgagaaattagagtccgtttacagatctaacgaatatgttgctaacatttgtgtttatgccgaccaatctaagactaagccagttggtattattgtaccaaatcatgctccattaacgaagcttgctaaaaagttgggaattatggaacaaaaagacagttcaattaatatcgaaaattatttggaggatgcaaaattgattaaagctgtttattctgatcttttgaagacaggtaaagaccaaggtttggttggcattgaattactagcaggcatagtgttctttgacggcgaatggactccacaaaacggttttgttacgtccgctcagaaattgaaaagaaaagacattttgaatgctgtcaaagataaagttgacgccgtttatagttcgtcttaa

SEQ ID NO: 19 - protein, 700 aa, Saccharomyces cerevisiae S288c
MVAQYTVPVGKAANEHETAPRRNYQCREKPLVRPPNTKCSTVYEFVLECFQKNKNSNAMGWRDVKEIHEESKSVMKKVDGKETSVEKKWMYYELSHYHYNSFDQLTDIMHEIGRGLVKIGLKPNDDDKLHLYAATSHKWMKMFLGAQSQGIPVVTAYDTLGEKGLIHSLVQTGSKAIFTDNSLLPSLIKPVQAAQDVKYIIHFDSISSEDRRQSGKIYQSAHDAINRIKEVRPDIKTFSFDDILKLGKESCNEIDVHPPGKDDLCCIMYTSGSTGEPKGVVLKHSNVVAGVGGASLNVLKFVGNTDRVICFLPLAHIFELVFELLSFYWGACIGYATVKTLTSSSVRNCQGDLQEFKPTIMVGVAAVWETVRKGILNQIDNLPFLTKKIFWTAYNTKLNMQRLHIPGGGALGNLVFKKIRTATGGQLRYLLNGGSPISRDAQEFITNLICPMLIGYGLTETCASTTILDPANFELGVAGDLTGCVTVKLVDVEELGYFAKNNQGEVWITGANVTPEYYKNEEETSQALTSDGWFKTGDIGEWEANGHLKIIDRKKNLVKTMNGEYIALEKLESVYRSNEYVANICVYADQSKTKPVGIIVPNHAPLTKLAKKLGIMEQKDSSINIENYLEDAKLIKAVYSDLLKTGKDQGLVGIELLAGIVFFDGEWTPQNGFVTSAQKLKRKDILNAVKDKVDAVYSSS

SEQ ID NO: 20 - DNA, 2235 bp, Saccharomyces cerevisiae S288c
atggccgctccagattatgcacttaccgatttaattgaatcggatcctcgtttcgaaagtttgaagacaagattagccggttacaccaaaggctctgatgaatatattgaagagctatactctcaattaccactgaccagctatcccaggtacaaaacatttttaaagaaacaggcggttgccatttcgaatccggataatgaagctggttttagctcgatttataggagttctctttcttctgaaaatctagtgagctgtgtggataaaaacttaagaactgcatacgatcacttcatgttttctgcaaggagatggcctcaacgtgactgtttaggttcaaggccaattgataaagccacaggcacctgggaggaaacattccgtttcgagtcgtactccacggtatctaaaagatgtcataatatcggaagtggtatattgtctttggtaaacacgaaaaggaaacgtcctttggaagccaatgattttgttgttgctatcttatcacacaacaaccctgaatggatcctaacagatttggcctgtcaggcctattctctaactaacacggctttgtacgaaacattaggtccaaacacctccgagtacatattgaatttaaccgaggcccccattctgatttttgcaaaatcaaatatgtatcatgtattgaagatggtgcctgatatgaaatttgttaatactttggtttgtatggatgaattaactcatgacgagctccgtatgctaaatgaatcgttgctacccgttaagtgcaactctctcaatgaaaaaatcacatttttttcattggagcaggtagaacaagttggttgctttaacaaaattcctgcaattccacctaccccagattccttgtatactatttcgtttacttctggtactacaggtttacctaaaggtgtggaaatgtctcacagaaacattgcgtctgggatagcatttgctttttctaccttcagaataccgccagataaaagaaaccaacagttatatgatatgtgttttttgccattggctcatatttttgaaagaatggttattgcgtatgatctagccatcgggtttggaataggcttcttacataaaccagacccaactgtattggtagaggatttgaagattttgaaaccttacgcggttgccctggttcctagaatattaacacggtttgaagccggtataaaaaacgctttggataaatcgactgtccagaggaacgtagcaaatactatattggattctaaatcggccagatttaccgcaagaggtggtccagataaatcgattatgaattttctagtttatcatcgcgtattgattgataaaatcagagactctttaggtttgtccaataactcgtttataattaccggatcagctcccatatctaaagataccttactatttttaagaagtgccttggatattggtataagacagggctacggcttaactgaaacttttgctggtgtctgtttaagcgaaccgtttgaaaaagatgtcggatcttgtggtgccataggtatttctgcagaatgtagattgaagtctgttccagaaatgggttaccatgccgacaaggatttaaaaggtgaactgcaaattcgtggcccacaggtttttgaaagatattttaaaaatccgaatgaaacttcaaaagccgttgaccaagatggttggttttccacgggagatgttgcatttatcgatggaaaaggtcgcatcagcgtcattgatcgagtcaagaactttttcaagctagcacatggtgaatatattgctccagagaaaatcgaaaatatttatttatcatcatgcccctatatcacgcaaatatttgtctttggagatcctttaaagacatttttagttggcatcgttggtgttgatgttgatgcagcgcaaccgattttagctgcaaagcacccagaggtgaaaacgtggactaaggaagtgctagtagaaaacttaaatcgtaataaaaagctaaggaaggaatttttaaacaaaattaataaatgcaccgatgggctacaaggattcgaaaaattgcataacatcaaagtcggacttgagcctttaactctcgaggatgatgttgtgacgccaacttttaaaataaagcgtgccaaagcatcaaaattcttcaaagatacattagaccaactatacgccgaaggttcactagtcaagacagaaaagctttag

SEQ ID NO: 21 - protein, 744 aa, Saccharomyces cerevisiae S288c
MAAPDYALTDLIESDPRFESLKTRLAGYTKGSDEYIEELYSQLPLTSYPRYKTFLKKQAVAISNPDNEAGFSSIYRSSLSSENLVSCVDKNLRTAYDHFMFSARRWPQRDCLGSRPIDKATGTWEETFRFESYSTVSKRCHNIGSGILSLVNTKRKRPLEANDFVVAILSHNNPEWILTDLACQAYSLTNTALYETLGPNTSEYILNLTEAPILIFAKSNMYHVLKMVPDMKFVNTLVCMDELTHDELRMLNESLLPVKCNSLNEKITFFSLEQVEQVGCFNKIPAIPPTPDSLYTISFTSGTTGLPKGVEMSHRNIASGIAFAFSTFRIPPDKRNQQLYDMCFLPLAHIFERMVIAYDLAIGFGIGFLHKPDPTVLVEDLKILKPYAVALVPRILTRFEAGIKNALDKSTVQRNVANTILDSKSARFTARGGPDKSIMNFLVYHRVLIDKIRDSLGLSNNSFIITGSAPISKDTLLFLRSALDIGIRQGYGLTETFAGVCLSEPFEKDVGSCGAIGISAECRLKSVPEMGYHADKDLKGELQIRGPQVFERYFKNPNETSKAVDQDGWFSTGDVAFIDGKGRISVIDRVKNFFKLAHGEYIAPEKIENIYLSSCPYITQIFVFGDPLKTFLVGIVGVDVDAAQPILAAKHPEVKTWTKEVLVENLNRNKKLRKEFLNKINKCTDGLQGFEKLHNIKVGLEPLTLEDDVVTPTFKIKRAKASKFFKDTLDQLYAEGSLVKTEKL

SEQ ID NO: 22 - DNA, 2081 bp, Artificial Sequence
  S. cerevisiae FadD homolog (Faa3p)  - codon optimized
atgtctgaacaacactcggtggccgtcggtaaagccgctaacgaacatgaaactgccccccgacgtaacgtgcgcgtgaaaaaacgccccttgattcgccctctcaatagcagcgcgtcgacgttgtatgagtttgccctggaatgctttaacaaggggggcaaacgcgatggcatggcgtggcgagacgtcatcgagattcacgaaacgaagaagactatcgtgcgtaaggtcgacggaaaggataaaagcattgaaaagacctggctgtactacgaaatgagcccgtacaaaatgatgacgtatcaggaactcatttgggtgatgcatgatatgggtcgcgggctcgccaagattggcatcaagcccaacggtgaacacaaatttcatattttcgcgtcgacctcccacaaatggatgaaaatctttctcggctgcatctcgcaaggcattcctgtggtcaccgcttatgataccctcggcgaaagtggtctcattcattctatggtggaaacagagagtgctgctatctttacagataaccaattgctggcgaaaatgatcgtgcctctgcagtctgctaaagatatcaagtttctcattcacaacgagccaatcgaccccaatgatcgacgccagaatggaaaactctataaagctgctaaggacgcgatcaacaagattcgcgaggttcggcctgatatcaagatttactcgttcgaagaagtggttaaaatcggcaagaagagtaaagatgaagtgaaactgcatccgcccgaacccaaggatctcgcgtgtatcatgtacaccagtggatctatcagcgcgcccaaaggggtggtcctgacccattataatatcgtcagtgggattgcaggcgttgggcataacgtctttggctggatcggctccaccgatcgtgtcctgagctttttgcctctcgcacacattttcgaactcgtttttgaattcgaagcgttctactggaatggtattctgggatacggcagcgtgaaaaccttgacgaatacgagcacccgcaactgtaaaggtgatctggtggagtttaaaccgaccatcatgattggtgttgcggccgtttgggagacggtccgcaaagcgatcctggagaaaatcagtgatttgacaccggtgctgcagaagattttctggtcggcttacagcatgaaagagaaaagtgtgccatgcacgggatttttgtctcgtatggtctttaaaaaggttcgacaagctaccggtggtcacctcaagtatattatgaatggcggctccgctatctctattgacgcccaaaaattctttagtatcgtcttgtgcccgatgatcattggttatggcttgactgaaacagtggcaaacgcctgtgttctcgagccggaccattttgagtatggcatcgttggggacctggtggggtcggtcacggcaaaattggttgacgtgaaggatctggggtactatgccaaaaataatcagggggaactcctgttgaagggagcgcccgtctgcagcgaatactacaagaatccgattgagacagctgtgagcttcacatacgacggttggtttcgtaccggcgatatcgtcgagtggacgccaaagggtcagctcaaaattattgatcggcgcaagaacctggtcaagactttgaatggcgagtatattgcgctggaaaagctggagagcgtttaccgctcgaacagttacgtcaagaatatctgtgtgtacgccgatgagtcccgagtgaaacccgttggtattgtggtcccaaaccctggaccgctgtctaagtttgctgtcaagctgcgcattatgaagaagggggaagacattgagaattatattcacgataaggcgctccggaacgcagtgttcaaagagatgatcgccactgcaaaatcgcagggcctggtcggcattgagctgttgtgtggtatcgttttcttcgacgaggaatggactcccgaaaatggcttcgtgactagcgcccaaaagttgaaacggcgcgagattttggcagccgtcaaatccgaggttgaacgcgtctataaagaaaatag

SEQ ID NO: 23 - protein, 694 aa, Saccharomyces cerevisiae S288c
MSEQHSVAVGKAANEHETAPRRNVRVKKRPLIRPLNSSASTLYEFALECFNKGGKRDGMAWRDVIEIHETKKTIVRKVDGKDKSIEKTWLYYEMSPYKMMTYQELIWVMHDMGRGLAKIGIKPNGEHKFHIFASTSHKWMKIFLGCISQGIPVVTAYDTLGESGLIHSMVETESAAIFTDNQLLAKMIVPLQSAKDIKFLIHNEPIDPNDRRQNGKLYKAAKDAINKIREVRPDIKIYSFEEVVKIGKKSKDEVKLHPPEPKDLACIMYTSGSISAPKGVVLTHYNIVSGIAGVGHNVFGWIGSTDRVLSFLPLAHIFELVFEFEAFYWNGILGYGSVKTLTNTSTRNCKGDLVEFKPTIMIGVAAVWETVRKAILEKISDLTPVLQKIFWSAYSMKEKSVPCTGFLSRMVFKKVRQATGGHLKYIMNGGSAISIDAQKFFSIVLCPMIIGYGLTETVANACVLEPDHFEYGIVGDLVGSVTAKLVDVKDLGYYAKNNQGELLLKGAPVCSEYYKNPIETAVSFTYDGWFRTGDIVEWTPKGQLKIIDRRKNLVKTLNGEYIALEKLESVYRSNSYVKNICVYADESRVKPVGIVVPNPGPLSKFAVKLRIMKKGEDIENYIHDKALRNAVFKEMIATAKSQGLVGIELLCGIVFFDEEWTPENGFVTSAQKLKRREILAAVKSEVERVYKENS

SEQ ID NO: 24 - DNA, 1632 bp, Synechococcus elongatus PCC 7942
atgaatatccacactgtcgcgacgcaagcctttagcgaccaaaagcccggtacctccggcctgcgcaagcaagttcctgtcttccaaaaacggcactatctcgaaaactttgtccagtcgatcttcgatagccttgagggttatcagggccagacgttagtgctggggggtgatggccgctactacaatcgcacagccatccaaaccattctgaaaatggcggcggccaatggttggggccgcgttttagttggacaaggcggtattctctccacgccagcagtctccaacctaatccgccagaacggagccttcggcggcatcatcctctcggctagccacaacccagggggccctgagggcgatttcggcatcaagtacaacatcagcaacggtggccctgcacccgaaaaagtcaccgatgccatctatgcctgcagcctcaaaattgaggcctaccgcattctcgaagccggtgacgttgacctcgatcgactcggtagtcaacaactgggcgagatgaccgttgaggtgatcgactcggtcgccgactacagccgcttgatgcaatccctgtttgacttcgatcgcattcgcgatcgcctgaggggggggctacggattgcgatcgactcgatgcatgccgtcaccggtccctacgccaccacgatttttgagaaggagctaggcgcggcggcaggcactgtttttaatggcaagccgctggaagactttggcgggggtcacccagacccgaatttggtctacgcccacgacttggttgaactgttgtttggcgatcgcgccccagattttggcgcggcctccgatggcgatggcgatcgcaacatgatcttgggcaatcacttttttgtgacccctagcgacagcttggcgattctcgcagccaatgccagcctagtgccggcctaccgcaatggactgtctgggattgcgcgatccatgcccaccagtgcggcggccgatcgcgtcgcccaagccctcaacctgccctgctacgaaaccccaacgggttggaagtttttcggcaatctgctcgatgccgatcgcgtcaccctctgcggcgaagaaagctttggcacaggctccaaccatgtgcgcgagaaggatggcctgtgggccgtgctgttctggctgaatattctggcggtgcgcgagcaatccgtggccgaaattgtccaagaacactggcgcacctacggccgcaactactactctcgccacgactacgaaggggtggagagcgatcgagccagtacgctggtggacaaactgcgatcgcagctacccagcctgaccggacagaaactgggagcctacaccgttgcctacgccgacgacttccgctacgaagatccggtcgatggcagcatcagcgaacagcagggcattcgtattggctttgaagacggctcacgtatggtcttccgcttgtctggtactggtacggcaggagccaccctgcgcctctacctcgagcgcttcgaaggggacaccaccaaacagggtctcgatccccaagttgccctggcagatttgattgcaatcgccgatgaagtcgcccagatcacaaccttgacgggcttcgatcaaccgacagtgatcacctga

SEQ ID NO: 25 - DNA, 1704 bp, Synechocystis sp. PCC 6803
gtgtctaagcccctgatcgccgccctccattttttacaatttttgtatatgacaagcagaattaatcccctcgccggccagcatccccccgccgacagccttttggatgtggccaaacttttagacgactattaccgtcagcaaccggacccggaaaatcccgcccagttagtgagctttggtacctctggccatcggggttctgccctcaacggtacttttaatgaagcccatattttggcggtgacccaggcagtggtggactatcgccaagcccagggcattacggggcccctttatatggggatggatagccatgctctgtcggaaccagcccagaaaacggcgttggaagtgttggccgctaaccaagtagaaacttttttaaccaccgccacggatttaacccgtttcacccccactccggcggtatcctacgccattttgacccacaaccagggacgtaaagaaggtttagcggacggcattattattaccccttcccacaatccccccactgatggaggctttaaatataatcccccctccggtggcccggcggaaccggaagcgacccaatggattcagaaccgggccaatgagttgctgaaaaatggcaataaaacagttaaacggctggattacgagcaggcattaaaagccaccaccacccatgcccatgattttgtcactccctatgtggccggtctggcggacatcattgacttggatgtaattcgttcagcgggcttgcgcttgggagttgaccccctggggggagccaatgtgggctattgggaacccattgccgctaaatacaatttgaacatcagcttggttaatcccggggtagatcccacgtttaaatttatgaccctggattgggacggcaaaatccgcatggattgttcttccccctacgccatggccagtttggtgaaaatcaaagaccattacgacattgcctttggcaacgacaccgacggcgatcgccatggcattgtcacccccagcgtgggtttgatgaatcccaatcattttctttccgtggccatttggtatttgtttagtcagcggcaacagtggtcagggctgtcggcgatcggcaaaaccctagtcagcagcagcatgattgaccgggtgggggccatgattaatcgccaagtttacgaagtgcccgtgggctttaaatggtttgtcagcggtttgctagatggttcctttggctttgggggtgaagaaagtgccggggcttcgtttttgaaaaaaaatggcaccgtttggaccaccgacaaagatggcaccattatggatttattggcggcggaaatcaccgctaaaaccggcaaagatcccggcctccattaccaggatttgaccgctaagttaggtaatcccatttaccaacgcattgatgcccccgccactccggcccaaaaagaccgcttgaaaaaactgtcccccgatgacgttacagctacctccttagctggggatgccattactgctaaattaaccaaagcccctggcaaccaagcggcgatcggtgggttgaaggtgaccactgcggaaggttggtttgcggcccggccctccggcacggaaaatgtttacaaaatctatgccgaaagtttcaaagacgaagcccatctccaggctattttcacggaggcggaagccattgttacctcggctttgggctaa

SEQ ID NO: 26 - DNA, 1659 bp, Synechococcus sp. WH8102
atgaccacctcggcccccgcggaaccgaccctgcgcctggtgcgcctggacgcacctttcacggatcagaaacccggcacatccggtttgcgcaaaagcagccagcagttcgagcaagcgaactatctggagagctttgtggaagccgtattccgcaccttgcccggtgttcaagggggcacgctggtgttgggaggtgacggccgttacggcaaccgccgtgccatcgacgtgatcctgcgcatgggcgcggcccacggcctcagcaaggtgatcgtcaccaccggcggcatcctctccaccccggcggcctcgaacctgattcgccagcgtcaggccatcggcggcatcatcctctcggcaagccacaaccctggcggccccaatggagacttcggcgtcaaggtgaatggcgccaacggtggcccgaccccggcctcgttcaccgatgcggtgttcgagtgcaccaagaccttggagcaatacacgatcgttgatgccgcggccatcgccatcgatacccccggcagctacagcatcggcgccatgcaggtggaggtgatcgacggcgtcgacgacttcgtggctctgatgcaacagctgttcgactttgatcggatccgggagctgatccgcagcgacttcccgctggcgtttgatgcgatgcatgcggtcactggcccctacgccactcgcctgttggaagagatcctcggcgctcctgccggcagcgtccgcaacggcgttcctctggaggacttcggcggcggccaccccgaccccaacctcacctacgcccacgagctggccgaacttctgctcgacggggaggagttccgcttcggggccgcctgcgacggcgatggtgaccgcaacatgatcctggggcagcactgcttcgtaaaccccagcgacagcctggcggtgctcacagccaacgccacggtggcaccggcctatgccgatggtttggctggcgtggcccgctcgatgcccaccagctctgccgtggatgtggtggccaaggaactgggcatcgactgctacgagacccccaccggctggaagttcttcggcaatctgctggatgccggcaaaatcacgctctgcggtgaagagagcttcggcaccggcagcaaccacgtgcgtgaaaaggatggcctctgggctgttctgttctggctgcagatcctggccgagcgccgctgcagcgtcgccgagatcatggctgagcattggaagcgcttcggccgccactactactctcgccacgactacgaagccgtcgccagcgacgcagcccatgggctgttccaccgcctcgagggcatgctccctggtctggtggggcagagcttcgctggccgcagcgtcagcgcagccgacaacttcagctacaccgatcccgttgatggctctgtgaccaagggccagggcctgcgcatcctgctggaggatggcagccgcgtgatggtgcgcctctcgggcaccggcaccaagggcgccacgatccgcgtctatctggagagttatgtaccgagcagcggtgatctcaaccaggatccccaggtcgctctggccgacatgatcagcgccatcaatgaactggcggagatcaagcagcgcaccggcatggatcggcccaccgtgatcacctga

SEQ ID NO: 27 - DNA, 1293 bp, Synechococcus elongatus PCC 7942
gtgaaaaacgtgctggcgatcattctcggtggaggcgcaggcagtcgtctctatccactaaccaaacagcgcgccaaaccagcggtccccctggcgggcaaataccgcttgatcgatattcccgtcagcaattgcatcaacgctgacatcaacaaaatctatgtgctgacgcagtttaactctgcctcgctcaaccgccacctcagtcagacctacaacctctccagcggctttggcaatggctttgttgaggtgctagcagctcagattacgccggagaaccccaactggttccaaggcaccgccgatgcggttcgccagtatctctggctaatcaaagagtgggatgtggatgagtacctgatcctgtcgggggatcatctctaccgcatggactatagccagttcattcagcggcaccgagacaccaatgccgacatcacactctcggtcttgccgatcgatgaaaagcgcgcctctgattttggcctgatgaagctagatggcagcggccgggtggtcgagttcagcgaaaagcccaaaggggatgaactcagggcgatgcaagtcgataccacgatcctcgggcttgaccctgtcgctgctgctgcccagcccttcattgcctcgatgggcatctacgtcttcaagcgggatgttctgatcgatttgctcagccatcatcccgagcaaaccgactttggcaaggaagtgattcccgctgcagccacccgctacaacacccaagcctttctgttcaacgactactgggaagacatcggcacgatcgcctcattctacgaggccaatctggcgctgactcagcaacctagcccacccttcagcttctacgacgagcaggcgccgatttacacccgcgctcgctacctgccgccaaccaagctgctcgattgccaggtgacccagtcgatcattggcgagggctgcattctcaagcaatgcaccgttcagaattccgtcttagggattcgctcccgcattgaggccgactgcgtgatccaggacgccttgttgatgggcgctgacttctacgaaacctcggagctacggcaccagaatcgggccaatggcaaagtgccgatgggaatcggcagtggcagcaccatccgtcgcgccatcgtcgacaaaaatgcccacattggccagaacgttcagatcgtcaacaaagaccatgtggaagaggccgatcgcgaagatctgggctttatgatccgcagcggcattgtcgttgtggtcaaaggggcggttattcccgacaacacggtgatctaa

SEQ ID NO: 28 - DNA, 1320 bp, Synechocystis sp. PCC 6803
gtgtgttgttggcaatcgagaggtctgcttgtgaaacgtgtcttagcgattatcctgggcggtggggccgggacccgcctctatcctttaaccaaactcagagccaaacccgcagttcccttggccggaaagtatcgcctcatcgatattcccgtcagtaattgcatcaactcagaaatcgttaaaatttacgtccttacccagtttaattccgcctcccttaaccgtcacatcagccgggcctataatttttccggcttccaagaaggatttgtggaagtcctcgccgcccaacaaaccaaagataatcctgattggtttcagggcactgctgatgcggtacggcaatacctctggttgtttagggaatgggacgtagatgaatatcttattctgtccggcgaccatctctaccgcatggattacgcccaatttgttaaaagacaccgggaaaccaatgccgacataaccctttccgttgtgcccgtggatgacagaaaggcacccgagctgggcttaatgaaaatcgacgcccagggcagaattactgacttttctgaaaagccccagggggaagccctccgggccatgcaggtggacaccagcgttttgggcctaagtgcggagaaggctaagcttaatccttacattgcctccatgggcatttacgttttcaagaaggaagtattgcacaacctcctggaaaaatatgaaggggcaacggactttggcaaagaaatcattcctgattcagccagtgatcacaatctgcaagcctatctctttgatgactattgggaagacattggtaccattgaagccttctatgaggctaatttagccctgaccaaacaacctagtcccgactttagtttttataacgaaaaagcccccatctataccaggggtcgttatcttccccccaccaaaatgttgaattccaccgtgacggaatccatgatcggggaaggttgcatgattaagcaatgtcgcatccaccactcagttttaggcattcgcagtcgcattgaatctgattgcaccattgaggatactttggtgatgggcaatgatttctacgaatcttcatcagaacgagacaccctcaaagcccggggggaaattgccgctggcataggttccggcaccactatccgccgagccatcatcgacaaaaatgcccgcatcggcaaaaacgtcatgattgtcaacaaggaaaatgtccaggaggctaaccgggaagagttaggtttttacatccgcaatggcatcgtagtagtgattaaaaatgtcacgatcgccgacggcacggtaatctag

SEQ ID NO: 29 - DNA, 1290 bp, Synechococcus sp. PCC 7002
gtgaaacgagtcctaggaatcatacttggcggcggcgcaggtactcgcctatatccgctaacaaaactcagagctaagcccgcagtacctctagcaggcaaatatcgtctcattgatattcctgttagcaattgcattaattctgaaattcataaaatctacattttaacccaatttaattcagcatctttaaatcgtcacattagtcgaacctacaactttaccggcttcaccgaaggctttaccgaagtactcgcagcccaacaaactaaagaaaatcccgattggttccaaggcaccgccgacgctgtccgacagtacagttggcttctagaagactgggatgtcgatgaatacatcattctctccggtgatcacctctaccgtatggattaccgtgaatttatccagcgccaccgtgacactggggcagacatcaccctgtctgtggttcccgtgggcgaaaaagtagcccccgcctttgggttgatgaaaattgatgccaatggtcgtgtcgtggactttagtgaaaagcccactggtgaagcccttaaggcgatgcaggtggatacccagtccttgggtctcgatccagagcaggcgaaagaaaagccctacattgcgtcgatggggatctacgtctttaagaaacaagtactcctcgatctactcaaagaaggcaaagataaaaccgatttcgggaaagaaattattcctgatgcggccaaggactacaacgttcaggcctatctctttgatgattattgggctgacattgggaccatcgaagcgttctatgaagcaaaccttggcttgacgaagcagccgatcccaccctttagtttctatgacgaaaaggctcccatctacacccgggcgcgctacttaccgccgacgaaggtgctcaacgctgacgtgacagaatcgatgatcagcgaaggttgcatcattaaaaactgccgcattcaccactcagttcttggcattcgcacccgtgtcgaagcggactgcactatcgaagatacgatgatcatgggcgcagattattatcagccctatgagaagcgccaggattgtctccgtcgtggcaagcctcccattgggattggtgaagggacaacgattcgccgggcgatcatcgataaaaatgcacgcatcggtaaaaacgtgatgatcgtcaataaggaaaatgtggaggagtcaaaccgtgaggagcttggctactacattcgcagcggcattacagtggtgctaaagaacgccgttattcccgacggtacggtcatttaa

SEQ ID NO: 30 - DNA, 1296 bp, Synechococcus sp. WH8102
atgaagcgggttttggccatcattctcggcggcggtgccgggactcgtctctacccgctcaccaagatgcgcgccaagccggccgtccccttggccggtaagtatcgactgattgatatccccatcagcaactgcatcaactcgaacatcaacaagatgtacgtgatgacgcagttcaacagtgcgtctctcaatcgtcacctcagccagacgttcaacctgagcgcatccttcggtcagggattcgtcgaggtgcttgctgcccagcagacgcctgacagtccatcctggtttgaaggcactgccgacgctgtgcggaagtaccagtggctgttccaggaatgggatgtcgatgaatacctgatcctgtccggtgaccagctgtaccggatggattacagcctgttcgttgaacatcaccgcagcactggtgctgacctcaccgttgcagcccttcctgtggacccgaaacaggccgaggcgttcggcttgatgcgcacggatggtgacggagacatcaaggagttccgcgaaaagcccaagggtgattctttgcttgagatggcggttgacaccagccgatttggactcagtgcgaattcggccaaggagcgtccctacctggcgtcgatggggatttatgtcttcagcagagacactctgttcgacctgctcgattccaatcctggttataaggacttcggcaaggaagtcattcctgaggccctcaagcgtggcgacaagctgaagagctatgtctttgacgattattgggaagatatcggaacgatcggagcgttctacgaggccaacctggcgctcacccagcaacccacaccccccttcagcttctacgacgagaagttcccgatctacactcgtccccgctatttacccccgagcaaactggttgatgctcagatcaccaattcgatcgttggcgaaggctcaattttgaagtcatgcagcattcatcactgcgttttgggtgttcgcagtcgcattgaaaccgatgtggtgctgcaagacaccttggtgatgggcgctgacttctttgaatccagtgatgagcgtgccgtgcttcgcgagcgtggtggtattccggtcggggtgggccaaggtacgactgtgaagcgcgccatcctcgataaaaacgctcgcatcggatccaacgtcaccatcgtcaacaaggatcacgtcgaggaagctgatcgttccgatcagggcttctatattcgtaatggcattgttgttgttgtcaagaacgccaccatccaggacggaactgtgatctga

SEQ ID NO: 31 - DNA, 1296 bp, Synechococcus sp. RCC 307
atgaaacgggttctcgcaatcattctcggtggcggtgcgggtacgcggctctatccgctgaccaaaatgcgggccaaaccagccgtgccgctggcgggtaagtaccgcctcatcgacatccccgttagcaactgcatcaacagcgggatcaacaagatctatgtgctgacgcagttcaacagcgcatcactgaatcgccacatcgctcaaaccttcaacctctcctcggggtttgatcaagggtttgttgaagttctggcggcccagcagaccccagatagccccagttggtttgaaggaacagccgatgctgttcgtaaatacgaatggctgctgcaggagtgggacatcgacgaagtgctgatcctttcgggtgaccagctctaccggatggactatgcccattttgtggctcagcaccgcgccagcggcgctgacctcaccgtggccgccctcccggttgatcgcgagcaagcccagagctttggcttgatgcacaccggtgcagaagcctccatcaccaagttccgcgaaaagcccaaaggcgaggcactcgatgagatgtcctgcgataccgccagcatgggcttgagcgctgaggaagcccatcgccggccgttcctggcttccatgggcatctacgtgttcaagcgggacgtgctcttccgcttactggctgaaaaccccggtgccactgacttcggtaaggagatcatccccaaggcactcgacgatggcttcaaactccgctcctatctcttcgacgattactgggaagacatcggaaccatccgtgctttctatgaagcgaatctggcgctgacgacccagccgcgtccgcccttctctttctacgacaagcgtttcccgatctacacacgtcatcgctacctgccgccctccaagcttcaagatgcgcaggtcaccgactccattgttggtgaggggtccattttgaaggcttgcagtattcaccactgcgtcttgggtgtgcgcagccgcattgaagacgaggttgccttgcaagacaccctggtgatgggcaacgacttctatgagtccggcgaagagcgggccatcctgcgggaacgtggtggcatccccatgggtgtgggccgaggaaccacggtgaaaaaggccatcctcgataagaacgtccgcatcggcagcaacgtcagcatcatcaacaaagacaacgttgaggaagccgaccgcgctgagcagggcttctacatccgtggcgggattgtggtgatcaccaaaaacgcttcgattcccgacgggatggtgatctga

SEQ ID NO: 32 - DNA, 1287 bp, Trichodesmium erythraeum IMS 101
gtgaaaaacgtactaagtataattctaggcggtggcgcaggtacccgtttatatcccttaacaaaactacgggccaagcctgcagtgcccctagcaggaaaatatcgtttaatagatattcctataagtaattgcataaactcagaaatccagaaaatttatgttttgacccaatttaactcagcttctctaaaccgccatatcactcgtacctataacttctcaggtttcagtgatggttttgtcgaagttctagcagctcaacaaactaaagataatccagagtggtttcaaggaacagcagatgctgtccgtaaatatatatggttattcaaagagtgggatattgattattatctaattctctctggagaccatctctaccgtatggactaccgagactttgtccaacgccatatcgacaccaaggcagatatcaccctttctgtcttgcctattgatgaagcacgggcctccgagtttggcgtcatgaaaattgataactcaggtcgaattgttgaatttagtgaaaaaccgaaaggtaatgcccttaaagctatggcagttgatacttctattttaggagtcagtccagaaatagctacaaaacaaccttatattgcttctatgggaatttatgtatttaataaagatgcaatgatcaaacttatagaagattcagaggatacagattttggtaaggaaattttacccaagtcggctcaatcttataatcttcaagcctacccattccaaggttactgggaagacatcggaaccatcaaatcattttatgaagctaatttggctttgactcaacagcctcagccaccctttagcttttatgatgaacaagcccctatctatacccgctctcgttatttacctccgagcaaacttttggactgtgagattacagagtcaattgtgggagaaggttgtattcttaaaaaatgtcggattgaccattgtgtcttaggagtgcgatcgcgtatagaagctaattgtataattcaagattctctgctaatgggttcagatttctatgaatctcctacagaacgtcgatatggcctaaaaaaaggttctgtacctttgggtattggtgctgaaacgaaaattcgtggagcaattattgacaaaaatgcccgcattggttgtaatgtccaaataatcaataaggacaatgtagaagaagcccaacgtgaggaggaagggtttatcattcgcagtggtattgttgttgttttgaaaaatgctactattcccgatggtacagtgatttag

SEQ ID NO: 33 - DNA, 1290 bp, Anabaena variabilis
gtgaaaaaagtcttagcaattattcttggtggtggtgcgggtactcgcctttacccactaaccaaactccgcgctaaaccggcagtaccagtggcagggaaataccgcctaatagatatccctgtcagtaactgcattaattcggaaatttttaaaatctacgtattaacacaatttaactcagcttctctcaatcgccacattgcccgtacctacaactttagtggttttagcgagggttttgtggaagtgctggccgcccagcagacaccagagaaccctaactggttccaaggtacagccgatgctgtacgtcagtatctctggatgttacaagagtgggacgtagatgaatttttgatcctgtcaggagatcacctgtaccggatggattatcgcctatttatccagcgccatcgagaaaccaatgcggatatcacactttccgtaattcccattgacgatcgccgcgcctcggattttggtttaatgaagatcgataactctggacgagtcatcgattttagcgaaaaacccaaaggcgaagccttaaccaaaatgcgtgttgataccaccgttttaggcttgacaccagaacaggcagcatcacagccttacatcgcctcgatggggatttacgtatttaaaaaagatgttttgatcaaactgttgaaggaatctttagaacgtactgatttcggcaaagaaattattcctgatgcctccaaagatcacaacgttcaagcttacttattcgatgactactgggaagatattgggacaatcgaagctttttataatgctaatttagcattgactcagcagcccatgccgccctttagcttctacgacgaagaagcaccaatttatacccgcgcacgttacttaccacccacaaaactattagattgccacgttacagaatcaatcattggcgaaggctgtattctgaaaaactgtcgcattcaacactcagtattgggagtgcgatcgcgtattgaaaccggctgcgtcatcgaagaatctttactcatgggtgccgacttctaccaagcttcagtggaacgccagtgcagcattgacaaaggagacatccccgtaggcatcggcccagataccattattcgccgtgccatcatcgataaaaatgcccgcatcggtcacgatgtcaaaattatcaataaagacaacgtgcaggaagccgaccgcgaaagtcaaggattttacatccgcagtggcattgtcgtcgttctcaaaaatgccgtcattaccgatggcacaataatttag

SEQ ID NO: 34 - DNA, 1290 bp, Nostoc sp. PCC 7120
gtgaaaaaagtcttagcaattattcttggtggtggtgcgggtactcgcctttacccactaaccaaactccgcgctaaaccggcagtaccagtggcagggaaataccgcctaatagatatccctgtcagtaactgcattaattcggaaatttttaaaatctacgtattaacacaatttaactcagcttctctcaatcgccacattgcccgtacctacaactttagtggttttagcgagggttttgtggaagtgctggccgcccagcagacaccagagaaccctaactggttccaaggtacagccgatgctgtacgtcagtatctctggatgttacaagagtgggacgtagatgaatttttgatcctgtcgggggatcacctgtaccggatggactatcgcctatttatccagcgccatcgagaaaccaatgcggatatcacactttccgtaattcccattgatgatcgccgcgcctcggattttggtttaatgaaaatcgataactctggacgagtcattgatttcagtgaaaaacccaagggcgaagccttaaccaaaatgcgtgttgataccacggttttaggcttgacaccagaacaggcggcatcacagccttacattgcctcgatggggatttacgtatttaaaaaagacgttttgatcaagctgttgaaggaagctttagaacgtactgatttcggcaaagaaattattcctgatgccgccaaagatcacaacgttcaagcttacctattcgatgactactgggaagatattgggacaatcgaagctttttataacgccaatttagcgttaactcagcagcccatgccgccctttagcttctacgatgaagaagcacctatttatacccgcgctcgttacttaccacccacaaaactattagattgccacgttacagaatcaatcattggcgaaggctgtattctgaaaaactgtcgcattcaacactcagtattgggagtgcgatcgcgtattgaaactggctgcatgatcgaagaatctttactcatgggtgccgacttctaccaagcttcagtggaacgccagtgcagcatcgataaaggagacatccctgtaggcatcggtccagatacaatcattcgccgtgccatcatcgataaaaatgcccgcatcggtcacgatgtcaaaattatcaataaagacaacgtgcaagaagccgaccgcgaaagtcaaggattttacatccgcagtggcattgtcgtcgtcctcaaaaatgccgttattacagatggcacaatcatttag

SEQ ID NO: 35 - DNA, 1398 bp, Synechococcus elongatus PCC 7942
atgcggattctgttcgtggctgccgaatgtgctcccttcgccaaagtgggaggcatgggagatgtggttggttccctgcccaaagtgctgaaagctctgggccatgatgtccgaatcttcatgccgtactacggctttctgaacagtaagctcgatattcccgctgaaccgatctggtggggctacgcgatgtttaatcacttcgcggtttacgaaacgcagctgcccggttcagatgtgccgctctacttaatggggcatccagcttttgatccgcatcgcatctactcaggagaagacgaagactggcgcttcacgttttttgccaatggggctgctgaattttcttggaactactggaaaccacaagtcattcactgccacgattggcacactgggatgattccggtttggatgcaccagtccccggatatctcgactgtcttcaccattcataacttggcctaccaagggccgtggcgctggaagctcgagaaaatcacctggtgcccttggtacatgcagggcgacagcaccatggcggcggccttgctctatgccgatcgcgtcaacacggtatcgcccacctatgcccagcagattcaaacaccgacctacggtgaaaagctggagggtcttctctcatttatcagtggcaagctaagcggcatccttaacgggattgatgttgatagctacaaccctgcaacggatacgcggattgtggccaactacgatcgcgacactcttgataaacgactgaacaataagctggcgctccaaaaggagatggggcttgaggtcaatcccgatcgcttcctgattggctttgtggctcgtctagtcgagcagaagggcattgacttgctgctgcaaattcttgatcgctttctgtcttacagcgatgcccaatttgttgtcttaggaacgggcgagcgctactacgaaacccagctctgggagttggcgacccgctatccgggccggatgtccacttatctgatgtacgacgaggggctgtcgcgacgcatttatgccggtagcgacgccttcttggtgccctctcgttttgaaccttgcggtatcacgcaaatgctggcactgcgctacggcagtgtgccgattgtgcgccgtacgggggggttggtcgatacggtcttccaccacgatccgcgtcatgccgagggcaatggctattgcttcgatcgctacgagccgctggacctctatacctgtctggtgcgggcttgggagagttaccagtaccagccccaatggcaaaagctacagcaacggggtatggccgttgatctgagctggaaacaatcggcgatcgcctacgaacagctctacgctgaagcgattgggctaccgatcgatgtcttacaggaggcctag

SEQ ID NO: 36 - DNA, 1434 bp, Synechocystis sp. PCC 6803
atgaagattttatttgtggcggcggaagtatcccccctagcaaaggtaggtggcatgggggatgtggtgggttccctgcctaaagttctgcatcagttgggccatgatgtccgtgtcttcatgccctactacggtttcatcggcgacaagattgatgtgcccaaggagccggtctggaaaggggaagccatgttccagcagtttgctgtttaccagtcctatctaccggacaccaaaattcctctctacttgttcggccatccagctttcgactcccgaaggatctatggcggagatgacgaggcgtggcggttcacttttttttctaacggggcagctgaatttgcctggaaccattggaagccggaaattatccattgccatgattggcacactggcatgatccctgtttggatgcatcagtccccagacatcgccaccgttttcaccatccataatcttgcttaccaagggccctggcggggcttgcttgaaactatgacttggtgtccttggtacatgcagggagacaatgtgatggcggcggcgattcaatttgccaatcgggtgactaccgtttctcccacctatgcccaacagatccaaaccccggcctatggggaaaagctggaagggttattgtcctacctgagtggtaatttagtcggtattctcaacggtattgatacggagatttacaacccggcggaagaccgctttatcagcaatgttttcgatgcggacagtttggacaagcgggtgaaaaataaaattgccatccaggaggaaacggggttagaaattaatcgtaatgccatggtggtgggtatagtggctcgcttggtggaacaaaaggggattgatttggtgattcagatccttgaccgcttcatgtcctacaccgattcccagttaattatcctcggcactggcgatcgccattacgaaacccaactttggcagatggcttcccgatttcctgggcggatggcggtgcaattactccacaacgatgccctttcccgtcgagtctatgccggggcggatgtgtttttaatgccttctcgctttgagccctgtgggctgagtcaattgatggccatgcgttatggctgtatccccattgtgcggcggacagggggtttggtggatacggtatccttctacgatcctatcaatgaagccggcaccggctattgctttgaccgttatgaacccctggattgctttacggccatggtgcgggcctgggagggtttccgtttcaaggcagattggcaaaaattacagcaacgggccatgcgggcagactttagttggtaccgttccgccggggaatatatcaaagtttataagggcgtggtggggaaaccggaggaattaagccccatggaagaggaaaaaatcgctgagttaactgcttcctatcgctaa

SEQ ID NO: 37 - DNA, 1437 bp, Synechococcus sp. PCC 7002
atgcgtattttgtttgtttctgccgaggctgctcccatcgctaaagctggaggcatgggagatgtggtgggatcactgcctaaagttttacggcagttaggacatgacgcgagaattttcttaccctattacggctttctcaacgacaaactcgacatccctgcagaacccgtttggtggggcagtgcgatgttcaatacttttgccgtttatgaaactgtgttgcccaacaccgatgtccccctttatctgtttggccatcccgcctttgatggacggcatatttatggtgggcaggatgaattttggcgctttaccttttttgccaatggggccgctgaatttatgtggaaccactggaaaccccagatcgcccactgtcacgactggcacacgggcatgattccggtatggatgcaccaatcgccggatatcagtacggtgtttacgatccacaacttagcctaccaagggccttggcggggtttcctggagcgcaatacttggtgtccctggtatatggatggtgataacgtgatggcttcggcgctgatgtttgccgatcaggtgaacaccgtatctcccacctatgcccaacaaatccaaaccaaagtctatggtgaaaaattagagggtttgttgtcttggatcagtggcaaaagtcgcggcatcgtgaatggtattgacgtagaactttataatccttctaacgatcaagccctggtgaagcaattttctacgactaatcttgaggatcgggccgccaacaaagtgattatccaagaagaaacggggctagaggtcaactccaaggcttttttgatggcgatggtcacccgcttagtggaacaaaagggcattgatctgctgctaaatatcctggagcagtttatggcatacactgacgcccagctcattatcctcggcactggcgatcgccactacgaaacccaactctggcagactgcctaccgctttaaggggcggatgtccgtgcaactgctctataatgatgccctctcccgccggatttacgctggatccgatgtctttttgatgccgtcacgctttgagccctgtggcattagtcaaatgatggcgatgcgctacggttctgtaccgattgtgcggcgcaccgggggtttggtggatacggtctctttccatgatccgattcaccaaaccgggacaggctttagttttgaccgctacgaaccgctggatatgtacacctgcatggtgcgggcttgggaaagtttccgctacaaaaaagactgggctgaactacaaagacgaggcatgagccatgactttagttggtacaaatctgccggggaatatctcaagatgtaccgccaaagcattaaagaagctccggaattaacgaccgatgaagccgaaaaaatcacctatttagtgaaaaaacacgccatttaa

SEQ ID NO: 38 - DNA, 1542 bp, Synechococcus sp. WH8102
atgcgcatcctcttcgctgccgcggaatgcgccccgatgatcaaggtcggtggcatgggggatgtggtgggatcgctgcctccggctctggccaagcttggccacgacgtgcggctgatcatgccgggctactccaagctctggaccaagctgacgatctcggacgaacccatctggcgcgcccagacgatgggtacggaattcgcggtttacgagacgaagcatccaggcaatgggatgaccatctacctggtgggacatccggtgttcgatcccgagcggatctatggcggtgaagatgaggactggcgcttcaccttctttgccagtgccgccgctgaattcgcctggaatgtctggaagccgaatgttcttcactgccacgactggcacaccggcatgattccggtctggatgcaccaggacccggagatcagcacggtcttcaccatccacaacctcaagtaccagggcccctggcgttggaagctggatcgcatcacctggtgcccctggtacatgcagggagatcacaccatggcggcggcacttctgtacgccgaccgggtcaacgccgtctcccccacctacgccgaggaaatccgtacggcggagtacggcgaaaagctggatggtttgctcaatttcgtctccggcaagctgcgcggcatcctcaatggcattgacctcgaggcctggaacccccagaccgatggggctctgccggccaccttcagcgccgacgacctctccggtaaagcggtctgcaagcgggtgttgcaggagcgcatgggtcttgaggtgcgtgacgacgcctttgtcctcggcatggtcagccgactcgtcgatcagaagggcgtcgatctgcttctgcaggtggcggaccgtttgctcgcctacaccgacacgcagatcgtggtgctcggcaccggtgaccgtggcctggaatccggcctgtggcagctggcctcccgccatgccggccgttgcgccgtcttcctcacctacgacgacgacctctcccgactgatctatgccggcagtgacgccttcctgatgcccagtcgcttcgagccctgcggcatcagccagctgtacgccatgcgttacggctccgttcctgtggtgcgcaaggtgggcggcctggtggacaccgttcctccccacagtccagctgatgccagcgggaccggcttctgcttcgatcgttttgagccggtcgacttctacaccgcattggtgcgtgcctgggaggcctaccgccatcgcgacagctggcaggagttgcagaagcgcggcatgcagcaggactacagctgggaccgttcggccatcgattacgacgtcatgtaccgcgatgtctgcggtctgaaggaacccacccctgatgccgcgatggtggaacagttctcccagggacaggctgcggatccctcccgcccagaggatgatgcgatcaatgctgctcccgaggcggtcaccgcgccgtccggccccagccgcaacccccttaatcgtctcttcggccgcagggccgactga

SEQ ID NO: 39 - DNA, 1524 bp, Synechococcus sp RCC 307
atgcgcatcctctttgctgcggccgaatgcgcaccgatggtgaaagtcggcggcatgggagatgtggtgggatctctgcctccagccctcgctgagttgggtcacgacgtgcgcgtgatcatgcccggctacggcaagctctggtcccagcttgatgtgcccagcgagccgatctggcgtgcccaaaccatgggcaccgattttgctgtctatgagacccgtcaccccaagaccgggctcacgatctatttggtgggccatccggtttttgatggtgagcgcatctatggaggtgaagacgaggactggcgcttcaccttcttcgctagcgccacctccgaatttgcctggaacgcttggaagccccaggtgctgcattgccatgactggcacaccggcatgattccggtgtggatgcaccaagaccccgagatcagcacggtcttcaccatccacaacctcaaatatcaaggtccctggcgctggaagctcgagcgcatgacctggtgcccctggtacatgcagggcgaccacaccatggcggcagccttgctgtatgccgaccgcgtcaatgcggtttcacccacctacgcccaagagatccgcacgccggaatacggcgaacaactggaggggttgctgaactacatcagcggcaagctgcgaggcatcctcaatggcatcgatgtggaggcttggaatcccgccactgattcgcggattccggccacctacagcactgctgacctcagtggcaaagccgtctgcaagcgggctctgcaagagcgcatggggcttcaggtgaaccccgacacctttgtgatcggtttggtgagccgtttggtggaccaaaaaggcgtcgacctgctgctgcaggttgccgaacgcttccttgcctacaccgatacgcagatcgttgtgttgggcaccggggatcgccatttggaatcgggcctgtggcaaatggcgagtcagcacagcggccgcttcgcttccttcctcacctacgacgatgatctctcccggctgatctacgccggcagtgatgccttcttgatgccctcgcgctttgagccctgcggcatcagccagttgctctcgatgcgctacggcaccatcccggtggtgcgccgcgtcggtggactggtcgacaccgtgcctccctatgttcccgccacccaagagggcaatggcttctgcttcgaccgctatgaagcgatcgacctttacaccgccttggtgcgcgcctgggaggcctaccgccatcaagacagctggcagcaattgatgaagcgggtgatgcaggttgatttcagctgggctcgttccgccttggaatacgaccgcatgtatcgcgatgtttgcggaatgaaggagcccacgccggaagccgatgcggtggcggccttctccattccccagccgcctgaacagcaggccgcacgtgctgccgctgaagccgctgaccccaacccccaacggcgctttaatccccttggattgctgcgccgaaacggcggttga

SEQ ID NO: 40 - DNA, 1383 bp, Trichodesmium erythraeum IMS 101
atgcgaattttatttgtgtctgctgaagcgactcctttagcaaaagttggtggtatggcagatgtagtgggtgccttacccaaagtactacggaaaatgggtcacgatgttcgtatcttcatgccttattatggctttttaggcgacaagatggaagttcctgaggaacctatctgggaaggaacggccatgtatcaaaactttaagatttatgagacggtactaccaaaaagtgacgtgccattgtacctatttggtcacccggctttttggccacgtcatatttactatggagatgatgaggactggagattcactctatttgctaatggggcggccgagttttgctggaatggctggaaaccagagatagttcattgtaatgactggcacactggcatgattccagtttggatgcacgaaactccagacattaaaaccgtatttactattcataacctagcttatcaaggaccttggcgctggtacttggaaagaattacttggtgtccttggtacatggaagggcataatacaatggcagcagcagttcagtttgcagatcgggtaactactgtttctccaacctatgctagtcagatccaaacacctgcctacggagaaaatctagatggtttaatgtcttttattacggggaaactacacggtatcctcaatggtattgatatgaacttttataatccagctaatgacagatatattcctcaaacttatgatgtcaataccctggaaaaacgggttgacaataaaattgctcttcaagaagaagtaggttttgaagttaacaaaaatagctttctcatgggaatggtctcccgactggtagaacaaaaaggacttgatttaatgctgcaagtcttagatcggtttatggcttatactgatactcagtttattttgttgggtacaggcgatcgcttctatgaaacccaaatgtggcaaatagcaagtcgttatcctggtcggatgagtgtccaacttttacataatgatgccctttcccgacgaatatatgcaggtactgatgctttcttaatgcccagtcgatttgagccttgtggtattagtcagttattggcaatgcgttatggtagtatacctattgtccgtcgcacaggtgggttagttgatactgtctctttctatgatcctattaataatgtaggtactggctattcttttgatcgctatgaaccactagacctgcttactgcaatggtccgagcctatgaaggtttccggttcaaagatcaatggcaggagttacagaagcgtggcatgagagagaactttagctgggataagtcagctcaaggttatatcaaaatgtacaaatcaatgctcggattacctgaagaataa

SEQ ID NO: 41 - DNA, 1419 bp, Anabaena variabilis
atgcggattctatttgtggcagcagaagcagcacccatcgcaaaagtaggagggatgggtgatgttgtcggtgcattacctaaggtcttgagaaaaatggggcatgatgtgcgtatcttcttgccctattacggctttttgccagacaaaatggaaattcccaaagatccaatctggaagggatacgccatgtttcaggactttacagttcacgaagcagttctgcctggtactgatgttcccttgtatttatttggacatccagccttcaacccccggcgaatttattcgggagatgatgaagactggcggttcaccttgttttccaatggtgcggcggaattttgttggaattactggaaaccagaaattattcactgtcacgattggcacacaggcatgattcctgtgtggatgaaccaatcaccagatatcaccacagtcttcactatccacaacctagcttaccaagggccttggcgttggtatctagataaaattacttggtgtccttggtatatgcagggacacaacacaatggcggcggctgtccagtttgctgacagagtaaataccgtttctcctacatacgccgagcaaatcaagaccccggcttacggtgagaaaatagaaggcttgctgtctttcatcagtggtaaattatctgggattgttaacggtatagatacggaagtttatgacccagctaatgataaatttattgctcaaacttttactgctgatactttagataaacgcaaagccaacaaaattgctttacaagaagaagtagggttagaagttaacagcaatgcctttttaattggcatggtgacaaggttagtcgagcagaagggtttagatttagtcatccaaatgctcgatcgctttatggcttatactgatgctcagttcgtcttgttaggaacaggcgatcgctactacgaaactcaaatgtggcaattagcatcccgctaccccggacgtatggccacctatctcctatacaatgatgccctatcccgccgcatctacgccggttctgatgcctttttaatgcccagccgctttgaaccatgcggtattagccagatgatggctttacgctacggttccatccccatcgttcgccgcactgggggtttagttgacaccgtatcccaccacgaccccgtaaacgaagccggtacaggctactgctttgaccgctacgaacccctagacttattcacctgcatgattcgcgcctgggaaggcttccgctacaaaccccaatggcaagaactacaaaagcgtggtatgagtcaagacttcagctggtacaaatccgctaaggaatacgacagactctatcgctcaatatacggtttgccagaagcagaagagacacagccagagttaattctggcaaatcagtag

SEQ ID NO: 42 - DNA, 1419 bp, Nostoc sp. PCC 7120
atgcggattctatttgtggcagcagaagcagcacccattgcaaaagtaggagggatgggtgatgttgtcggtgcattacctaaggtcttgagaaaaatggggcatgatgtacgtatcttcttgccctattacggctttttgccagacaaaatggagattcccaaagatccaatatggaagggatacgccatgtttcaggactttacagttcacgaagcagttctgcctggtactgatgttcccttgtatttatttggacatccagcctttaccccccggcggatttattcgggagatgatgaagactggcgcttcaccttgttttccaatggtgcggctgagttttgctggaattactggaaacccgacattattcactgtcatgattggcacacgggcatgattcctgtgtggatgaaccaatcaccagatatcaccacagtcttcactatccacaatctggcttaccaagggccttggcgttggtatttagataaaattacttggtgtccttggtatatgcagggacacaacacaatggcggcggctgtccagtttgcggacagggtaaatacagtttctcccacatacgccgagcaaatcaagaccccggcttacggtgagaaaatagaaggtttgctgtctttcatcagtggtaaattatctgggattgttaacggtatagatacggaagtttacgacccagctaatgataaatatattgctcaaacgttcactgccgatactttagataaacgcaaagccaacaaaattgctttacaagaagaagtaggattagaagttaacagcaatgcctttttaattggcatggtgacaaggttagtcgagcagaagggcttagatttagtcatccaaatgctcgatcgctttatggcttatactgatgctcagttcgtcttgttgggaacaggcgatcgctactacgaaacccaaatgtggcaattagcatcccgctaccccggtcgtatggctacttacctcctgtataacgatgccctatctcgccgcatctacgctggtactgatgcctttttgatgcccagtcgctttgaaccatgcggtattagtcaaatgatggctttacgctacggttccattcccatcgtccgccgcactggaggcttggttgacaccgtatcccaccacgaccccatcaacgaagcaggtacaggctactgcttcgaccgctacgaacccctcgacttatttacctgcatgattcgcgcctgggaaggcttccgctacaaaccacaatggcaagaactacaaaaacgcggtatgagtcaagacttcagctggtacaaatccgctaaggaatacgacaaactctatcgctcaatgtacggtttgccagacccagaagagacacagccggagttaattctgacaaatcagtag

SEQ ID NO: 43 - DNA, 1953 bp, Synechococcus elongatus PCC 7942 0918
atggtgactggaaccgccctcgcgcaaccccgcgccattacgccccacgaacagcagcttttggccaaactgaaaagctatcgcgatatccaaagcttgtcgcaaatttggggacgtgctgccagtcaatttggatcgatgccggctttggttgcaccccatgccaaaccagcgatcaccctcagttatcaagaattggcgattcagatccaagcgtttgcagccggactgctcgcgctgggagtgcctacctccacagccgatgactttccgcctcgcttggcgcagtttgcggataacagcccccgctggttgattgctgaccaaggcacgttgctggcaggggctgccaatgcggtgcgcggcgcccaagctgaagtatcggagctgctctacgtcttagaggacagcggttcgatcggcttgattgtcgaagacgcggcgctgctgaagaaactacagcctggtttagcgtcactatcgctgcagtttgtgatcgtgctcagcgatgaagtagtcgagatcgacagcctgcgcgtcgttggttttagtgacgtgctggagatggggcgatcgctgccggcaccggagccaattttgcagctcgatcgcttagccactttgatctatacctcgggcaccacaggcccaccgaagggcgtgatgctttctcacggcaacctgctgcaccaagtcacaacattaggtgtggttgtgcagccgcaacctggcgacaccgtgctgagtattttgccgacttggcactcctacgagcgagcttgtgaatatttcctgctctcccagggctgcacacaggtctacacgacgctgcgcaatgtcaaacaagacatccggcagtatcggccgcagttcatggtcagtgtgctgcgcctctgggaatcgatctacgagggcgtgcagaagcagtttcgcgagcaaccggcgaagaaacgtcgcttgatcgataccttctttggcttgagtcaacgctatgttttggcacggcgccgctggcaaggactggatttgctggcactgaaccaatccccagcccagcgcctcgctgagggtgtccggatgttggcgctagcaccgttgcataagctgggcgatcgcctcgtctacggcaaagtacgagaagccacgggtggccgaattcggcaggtgatcagtggcggtggctcactggcactgcacctcgataccttcttcgaaattgttggtgttgatttgctggtgggttatggcttgacagaaacctcaccagtgctgacggggcgacggccttggcacaacctacggggttcggccggtcagccgattccaggtacggcgattcggatcgtcgatcctgaaacgaaggaaaaccgacccagtggcgatcgcggcttggtgctggcgaaagggccgcaaatcatgcagggctacttcaataaacccgaggcgaccgcgaaagcgatcgatgccgaaggttggtttgacaccggcgacttaggctacatcgtcggtgaaggcaacttggtgctaacggggcgcgctaaggacacgatcgtgctgaccaatggcgaaaacattgaaccccagccgattgaagatgcctgcctacgaagttcctatatcagccaaatcatgttggtgggacaagaccgcaagagtttgggggcgttgattgtgcccaatcaagaggcgatcgcactctgggccagcgaacagggcatcagccaaaccgatctgcagggagtggtacagaagctgattcgcgaggaactgaaccgcgaagtgcgcgatcgcccgggctaccgcatcgacgatcgcattggaccattccgcctcatcgaagaaccgttcagcatggaaaatggccagctaacccaaaccctgaaaatccgtcgcaacgttgtcgcggaacactacgcggctatgatcgacgggatgtttgaatcggcgagttaa

SEQ ID NO: 44 - protein, 650 aa, Synechococcus elongatus PCC 7942 0918
MVTGTALAQPRAITPHEQQLLAKLKSYRDIQSLSQIWGRAASQFGSMPALVAPHAKPAITLSYQELAIQIQAFAAGLLALGVPTSTADDFPPRLAQFADNSPRWLIADQGTLLAGAANAVRGAQAEVSELLYVLEDSGSIGLIVEDAALLKKLQPGLASLSLQFVIVLSDEVVEIDSLRVVGFSDVLEMGRSLPAPEPILQLDRLATLIYTSGTTGPPKGVMLSHGNLLHQVTTLGVVVQPQPGDTVLSILPTWHSYERACEYFLLSQGCTQVYTTLRNVKQDIRQYRPQFMVSVLRLWESIYEGVQKQFREQPAKKRRLIDTFFGLSQRYVLARRRWQGLDLLALNQSPAQRLAEGVRMLALAPLHKLGDRLVYGKVREATGGRIRQVISGGGSLALHLDTFFEIVGVDLLVGYGLTETSPVLTGRRPWHNLRGSAGQPIPGTAIRIVDPETKENRPSGDRGLVLAKGPQIMQGYFNKPEATAKAIDAEGWFDTGDLGYIVGEGNLVLTGRAKDTIVLTNGENIEPQPIEDACLRSSYISQIMLVGQDRKSLGALIVPNQEAIALWASEQGISQTDLQGVVQKLIREELNREVRDRPGYRIDDRIGPFRLIEEPFSMENGQLTQTLKIRRNVVAEHYAAMIDGMFESAS

SEQ ID NO: 45 - protein, 325 aa, Synechococcus sp. PCC7002
MPKTERRTFLLDFEKPLSELESRIHQIRDLAAENNVDVSEQIQQLEARADQLREEIFSTLTPAQRLQLARHPRRPSTLDYVQMMADEWFELHGDRGGSDDPALIGGVARFDGQPVMMLGHQKGRDTKDNVARNFGMPAPGGYRKAMRLMDHANRFGMPILTFIDTPGAWAGLEAEKLGQGEAIAFNLREMFSLDVPIICTVIGEGGSGGALGIGVGDRVLMLKNSVYTVATPEACAAILWKDAGKSEQAAAALKITAEDLKSLEIIDEIVPEPASCAHADPIGAAQLLKAAIQDNLQALLKLTPERRRELRYQRFRKIGVFLESS

SEQ ID NO: 46 - protein, 165 aa, Synechococcus sp. PCC 7002
MAINLQEIQELLSTIGQTNVTEFELKTDDFELRVSKGTVVAAPQTMVMSEAIAQPAMSTPVVSQATATPEASQAETPAPSVSIDDKWVAITSPMVGTFYRAPAPGEDPFVAVGDRVGNGQTVCIIEAMKLMNEIEAEVSGEVVKIAVEDGEPIEFGQTLMWVNPT

SEQ ID NO: 47 - protein, 448 aa, Synechococcus sp. PCC 7002
MQFSKILIANRGEVALRIIHTCQELGIATVAVHSTVDRQALHVQLADESICIGPPQSSKSYLNIPNIIAAALSSNADAIHPGYGFLAENAKFAEICADHQITFIGPSPEAMIAMGDKSTAKKTMQAAKVPTVPGSAGLVASEEQALEIAQQIGYPVMIKATAGGGGRGMRLVPSAEELPRLYRAAQGEAEAAFGNGGVYIEKFIERPRHIEFQILADQYGNVIHLGERDCSIQRRHQKLLEEAPSAILTPRLRDKMGKAAVKAAKSIDYVGAGTVEFLVDKNGDFYFMEMNTRIQVEHPVTEMVTGLDLIAEQIKVAQGDRLSLNQNQVNLNGHAIECRINAEDPDHDFRPTPGKISGYLPPGGPGVRMDSHVYTDYEISPYYDSLIGKLIVWGPDRDTAIRRMKRALRECAITGVSTTISFHQKILNHPAFLAADVDTNFIQQHMLP

SEQ ID NO: 48 - protein, 319 aa, Synechococcus sp. PCC 7002
MSLFDWFAANRQNSETQLQPQQEREIADGLWTKCKSCDALTYTKDLRNNQMVCKECGFHNRVGSRERVRQLIDEGTWTEISQNVAPTDPLKFRDKKAYSDRLKDYQEKTNLTDAVITGTGLIDGLPLALAVMDFGFMGGSMGSVVGEKICRLVEHGTAEGLPVVVVCASGGARMQEGMLSLMQMAKISGALERHRTKKLLYIPVLTNPTTGGVTASFAMLGDLILAEPKATIGFAGRRVIEQTLREKLPDDFQTSEYLLQHGFVDAIVPRTELKKTLAQMISLHQPFHPILPELQLAPHVEKEKVYEPIASTSTNDFYK

SEQ ID NO: 49 - protein, 2311 aa, Triticum aestivum
MGSTHLPIVGLNASTTPSLSTIRPVNSAGAAFQPSAPSRTSKKKSRRVQSLRDGGDGGVSDPNQSIRQGLAGIIDLPKEGTSAPEVDISHGSEEPRGSYQMNGILNEAHNGRHASLSKVVEFCMALGGKTPIHSVLVANNGRAAAKFMRSVRTWANETFGSEKAIQLIAMATPEDMRINAEHIRIADQFVEVPGGTNNNNYANVQLIVEIAVRTGVSAVWPGWGHASENPELPDALNANGIVFLGPPSSSMNALGDKVGSALIAQAAGVPTLPWGGSQVEIPLEVCLDSIPAEMYRKACVSTTEEALASCQMIGYPAMIKASWGGGGKGIRKVNNDDDVRALFKQVQGEVPGSPIFIMRLASQSRHLEVQLLCDQYGNVAALHSRDCSVQRRHQKIIEEGPVTVAPRETVKELEQAARRLAKAVGYVGAATVEYLYSMETGEYYFLELNPRLQVEHPVTEWIAEVNLPAAQVAVGMGIPLWQVPEIRRFYGMDNGGGYDIWRETAALATPFNFDEVDSQWPKGHCVAVRITSEDPDDGFKPTGGKVKEISFKSKPNVWAYFSVKSGGGIHEFADSQFGHVFAYGVSRAAAITNMSLALKEIQIRGEIHSNVDYTVDLLNASDFKENRIHTGWLDNRIAMRVQAERPPWYISVVGGALYKTITSNTDTVSEYVSYLVKGQIPPKHISLVHSTVSLNIEESKYTIETIRSGQGSYRLRMNGSVIEANVQTLCDGGLLMQLDGNSHVIYAEEEAGGTRLLIDGKTYLLQNDHDPSRLLAETPCKLLRFLVADGAHVEADVPYAEVEVMKMCMPLLSPAAGVINVLLSEGQPMQAGDLIARLDLDDPSAVKRAEPFNGSFPEMSLPIAASGQVHKRCATSLNAARMVLAGYDHPINKVVQDLVSCLDAPELPFLQWEELMSVLATRLPRLLKSELEGKYSEYKLNVGHGKSKDFPSKMLREIIEENLAHGSEKEIATNERLVEPLMSLLKSYEGGRESHAHFIVKSLFEDYLSVEELFSDGIQSDVIERLRQQHSKDLQKVVDIVLSHQGVRNKTKLILTLMEKLVYPNPAVYKDQLTRFSSLNHKRYYKLALKASELLEQTKLSELRTSIARSLSELEMFTEERTAISEIMGDLVTAPLPVEDALVSLFDCSDQTLQQRVIETYISRLYQPHLVKDSIQLKYQESGVIALWEFAEAHSEKRLGAMVIVKSLESVSAAIGAALKGTSRYASSEGNIMHIALLGADNQMHGTEDSGDNDQAQVRIDKLSATLEQNTVTADLRAAGVKVISCIVQRDGALMPMRHTFLLSDEKLCYGEEPVLRHVEPPLSALLELGKLKVKGYNEVKYTPSRDRQWNIYTLRNTENPKMLHRVFFRTLVRQPGASNKFTSGNISDVEVGGAEESLSFTSSSILRSLMTAIEELELHAIRTGHSHMFLCILKERKLLDLVPVSGNKVVDIGQDEATACLLLKEMALQIHELVGARMHHLSVCQWEVKLKLDSDGPASGTWRVVTTNVTSHTCTVDIYREVEDTESQKLVYHSAPSSSGPLHGVALNTPYQPLSVIDLKRCSARNNRTTYCYDFPLAFETAVQKSWSNISSDNNRCYVKATELVFAHKNGSWGTPVIPMERPAGLNDIGMVAWILDMSTPEYPNGRQIVVIANDITFRAGSFGPREDAFFETVTNLACERRLPLIYLAANSGARIGIADEVKSCFRVGWSDDGSPERGFQYIYLTEEDHARISASVIAHKMQLDNGEIRWVIDSVVGKEDGLGVENIHGSAAIASAYSRAYEETFTLTFVTGRTVGIGAYLARLGIRCIQRTDQPIILTGFSALNKLLGREVYSSHMQLGGPKIMATNGVVHLTVSDDLEGVSNILRWLSYVPANIGGPLPITKSLDPPDRPVAYIPENTCDPRAAISGIDDSQGKWLGGMFDKDSFVETFEGWAKSVVTGRAKLGGIPVGVIAVETQTMMQLIPADPGQLDSHERSVPRAGQVWFPDSATKTAQAMLDFNREGLPLFILANWRGFSGGQRDLFEGILQAGSTIVENLRAYNQPAFVYIPKAAELRGGAWVVIDSKINPDRIEFYAERTAKGNVLEPQGLIEIKFRSEELQECMGRLDPELINLKAKLQGVKHENGSLPESESLQKSIEARKKQLLPLYTQIAVRFAELHDTSLRMAAKGVIKKVVDWEDSRSFFYKRLRRRISEDVLAKEIRGVSGKQFSHQSAIELIQKWYLASKGAETGSTEWDDDDAFVAWRENPENYQEYIKEPRAQRVSQLLSDVADSSPDLEALPQGLSMLLEKMDPAKREIVEDFEINLVK

SEQ ID NO: 50 - DNA, 978 bp, Synechococcus sp. PCC 7002
atgccgaaaacggagcgccggacgtttctgcttgattttgaaaaacctctttcggaattagaatcacgcatccatcaaattcgtgatcttgctgcggagaataatgttgatgtttcagaacagattcagcagctagaggcgcgggcagaccagctccgggaagaaatttttagtaccctcaccccggcccaacggctgcaattggcacggcatccccggcgtcccagcacccttgattatgttcaaatgatggcggacgaatggtttgaactccatggcgatcgcggtggatctgatgatccggctctcattggcggggtggcccgcttcgatggtcaaccggtgatgatgctagggcaccaaaaaggacgggatacgaaggataatgtcgcccgcaattttggcatgccagctcctgggggctaccgtaaggcgatgcggctgatggaccatgccaaccgttttgggatgccgattttaacgtttattgatactcctggggcttgggcgggtttagaagcggaaaagttgggccaaggggaggcgatcgcctttaacctccgggaaatgtttagcctcgatgtgccgattatttgcacggtcattggcgaaggcggttccggtggggccttagggattggcgtgggcgatcgcgtcttgatgttaaaaaattccgtttacacagtggcgaccccagaggcttgtgccgccattctctggaaagatgccgggaaatcagagcaggccgccgccgccctcaagattacagcagaggatctgaaaagccttgagattatcgatgaaattgtcccagagccagcctcctgcgcccacgccgatcccattggggccgcccaactcctgaaagcagcgatccaagataacctccaagccttgctgaagctgacgccagaacgccgccgtgaattgcgctaccagcggttccggaaaattggtgtgtttttagaaagttcctaa

SEQ ID NO: 51 - DNA, 498 bp, Synechococcus sp.  PCC 7002
atggctattaatttacaagagatccaagaacttctatccaccatcggccaaaccaatgtcaccgagtttgaactcaaaaccgatgattttgaactccgtgtgagcaaaggtactgttgtggctgctccccagacgatggtgatgtccgaggcgatcgcccaaccagcaatgtccactcccgttgtttctcaagcaactgcaaccccagaagcctcccaagcggaaaccccggctcccagtgtgagcattgatgataagtgggtcgccattacctcccccatggtgggaacgttttaccgcgcgccggcccctggtgaagatcccttcgttgccgttggcgatcgcgttggcaatggtcaaaccgtttgcatcatcgaagcgatgaaattaatgaatgagattgaggcagaagtcagcggtgaagttgttaaaattgccgttgaagacggtgaacccattgaatttggtcagaccctaatgtgggtcaacccaacctaa

SEQ ID NO: 52 - DNA, 1347 bp, Synechococcus sp. PCC 7002
atgcagttttcaaagattctcatcgccaatcgcggagaagttgccctacgcattatccacacctgtcaggagctcggcattgccacagttgccgtccactccaccgtagatcgccaagccctccacgttcagctcgccgatgagagcatttgcattggcccgccccagagcagcaaaagctatctcaacattcccaatattatcgctgcggccctcagcagtaacgccgacgcaatccacccaggctacggtttcctcgctgaaaatgccaagtttgcagaaatttgtgccgaccaccaaatcaccttcattggcccttccccagaagcaatgatcgccatgggggacaaatccaccgccaaaaaaacgatgcaggcggcaaaagtccctaccgtacccggtagtgctgggttggtggcctccgaagaacaagccctagaaatcgcccaacaaattggctaccctgtgatgatcaaagccacggcgggtggtggtggccgggggatgcgccttgtgcccagcgctgaggagttaccccgtttgtaccgagcggcccagggggaagcagaagcagcctttgggaatggcggcgtttacatcgaaaaatttattgaacggccccgtcacatcgaatttcagatcctcgcggatcagtacggcaatgtaattcacctcggcgaacgggattgttcgatccaacggcggcaccaaaaactcctcgaagaagctcccagcgcgatcctcacccccagactgcgggacaaaatggggaaagcggcagtaaaagcggcgaaatccattgattatgtcggggcggggacggtggaattcctcgtggataagaatggggatttctactttatggaaatgaatacccgcattcaggtggaacacccggtcacagagatggtgacgggactagatctgatcgccgagcaaattaaagttgcccaaggcgatcgcctcagtttgaatcaaaatcaagtgaacttgaatggtcatgccatcgagtgccggattaatgccgaagatcccgaccatgatttccgaccgaccccaggcaaaatcagtggctatcttccccccggtggccctggggtacggatggattcccacgtttacaccgactatgaaatttctccttactacgattctttgatcggtaaattaatcgtttggggaccagaccgagacaccgccattcgccgcatgaagcgggcactccgagaatgtgccattactggagtatcgaccaccattagcttccaccaaaagattttgaatcatccggcttttttggcggccgatgtcgatacaaactttatccagcagcacatgttgccctag

SEQ ID NO: 53 - DNA, 960 bp, Synechococcus sp. PCC 7002
atgtctctttttgattggtttgccgcaaatcgccaaaattctgaaacccagctccagccccaacaggagcgcgagattgccgatggcctctggacgaaatgcaaatcctgcgatgctctcacctacactaaagacctccgcaacaatcaaatggtctgtaaagagtgtggcttccataaccgggtcggcagtcgggaacgggtacgccaattgattgacgaaggcacctggacagaaattagtcagaatgtcgcgccgaccgaccccctgaaattccgcgacaaaaaagcctatagcgatcgcctcaaagattaccaagagaaaacgaacctcaccgatgctgtaatcactggcacaggactgattgacggtttaccccttgctttggcagtgatggactttggctttatgggcggcagcatgggatccgttgtcggcgaaaaaatttgtcgcctcgtagaacatggcaccgccgaaggtttacccgtggtggttgtttgtgcttctggtggagcaagaatgcaagagggcatgctcagtctgatgcagatggcgaaaatctctggtgccctcgaacgccatcgcaccaaaaaattactctacatccctgttttgactaatcccaccaccgggggcgtcaccgctagctttgcgatgttgggcgatttgattcttgccgaacccaaagcaaccatcggttttgctggacgccgcgtcattgaacaaacattgcgcgaaaaacttcctgacgattttcagacatctgaatatttactccaacatgggtttgtggatgcgattgtgccccgcactgaattgaaaaaaaccctcgcccaaatgattagtctccatcagccctttcacccgattctgccagagctacaattggctccccatgtggaaaaagaaaaagtttacgaacccattgcctctacttcaaccaacgacttttacaagtag

SEQ ID NO: 54 - DNA, 6936 bp, Triticum aestivum
atgggatccacacatttgcccattgtcggccttaatgcctcgacaacaccatcgctatccactattcgcccggtaaattcagccggtgctgcattccaaccatctgccccttctagaacctccaagaagaaaagtcgtcgtgttcagtcattaagggatggaggcgatggaggcgtgtcagaccctaaccagtctattcgccaaggtcttgccggcatcattgacctcccaaaggagggcacatcagctccggaagtggatatttcacatgggtccgaagaacccaggggctcctaccaaatgaatgggatactgaatgaagcacataatgggaggcatgcttcgctgtctaaggttgtcgaattttgtatggcattgggcggcaaaacaccaattcacagtgtattagttgcgaacaatggaagggcagcagctaagttcatgcggagtgtccgaacatgggctaatgaaacatttgggtcagagaaggcaattcagttgatagctatggctactccagaagacatgaggataaatgcagagcacattagaattgctgatcaatttgttgaagtacccggtggaacaaacaataacaactatgcaaatgtccaactcatagtggagatagcagtgagaaccggtgtttctgctgtttggcctggttggggccatgcatctgagaatcctgaacttccagatgcactaaatgcaaacggaattgtttttcttgggccaccatcatcatcaatgaacgcactaggtgacaaggttggttcagctctcattgctcaagcagcaggggttccgactcttccttggggtggatcacaggtggaaattccattagaagtttgtttggactcgatacctgcggagatgtataggaaagcttgtgttagtactacggaggaagcacttgcgagttgtcagatgattgggtatccagccatgattaaagcatcatggggtggtggtggtaaagggatccgaaaggttaataacgacgatgatgtcagagcactgtttaagcaagtgcaaggtgaagttcctggctccccaatatttatcatgagacttgcatctcagagtcgacatcttgaagttcagttgctttgtgatcaatatggcaatgtagctgcgcttcacagtcgtgactgcagtgtgcaacggcgacaccaaaagattattgaggaaggaccagttactgttgctcctcgcgagacagtgaaagagctagagcaagcagcaaggaggcttgctaaggctgtgggttatgttggtgctgctactgttgaatatctctacagcatggagactggtgaatactattttctggaacttaatccacggttgcaggttgagcatccagtcaccgagtggatagctgaagtaaacttgcctgcagctcaagttgcagttggaatgggtatacccctttggcaggttccagagatcagacgtttctatggaatggacaatggaggaggctatgacatttggagggaaacagcagctcttgctactccatttaacttcgatgaagtggattctcaatggccaaagggtcattgtgtagcagttaggataaccagtgaggatccagatgacggattcaagcctaccggtggaaaagtaaaggagatcagttttaaaagcaagccaaatgtttgggcctatttctctgttaagtccggtggaggcattcatgaatttgctgattctcagtttggacatgtttttgcatatggagtgtctagagcagcagcaataaccaacatgtctcttgcgctaaaagagattcaaattcgtggagaaattcattcaaatgttgattacacagttgatctcttgaatgcctcagacttcaaagaaaacaggattcatactggctggctggataacagaatagcaatgcgagtccaagctgagagacctccgtggtatatttcagtggttggaggagctctatataaaacaataacgagcaacacagacactgtttctgaatatgttagctatctcgtcaagggtcagattccaccgaagcatatatcccttgtccattcaactgtttctttgaatatagaggaaagcaaatatacaattgaaactataaggagcggacagggtagctacagattgcgaatgaatggatcagttattgaagcaaatgtccaaacattatgtgatggtggacttttaatgcagttggatggaaacagccatgtaatttatgctgaagaagaggccggtggtacacggcttctaattgatggaaagacatacttgttacagaatgatcacgatccttcaaggttattagctgagacaccctgcaaacttcttcgtttcttggttgccgatggtgctcatgttgaagctgatgtaccatatgcggaagttgaggttatgaagatgtgcatgcccctcttgtcacctgctgctggtgtcattaatgttttgttgtctgagggccagcctatgcaggctggtgatcttatagcaagacttgatcttgatgacccttctgctgtgaagagagctgagccatttaacggatctttcccagaaatgagccttcctattgctgcttctggccaagttcacaaaagatgtgccacaagcttgaatgctgctcggatggtccttgcaggatatgatcacccgatcaacaaagttgtacaagatctggtatcctgtctagatgctcctgagcttcctttcctacaatgggaagagcttatgtctgttttagcaactagacttccaaggcttcttaagagcgagttggagggtaaatacagtgaatataagttaaatgttggccatgggaagagcaaggatttcccttccaagatgctaagagagataatcgaggaaaatcttgcacatggttctgagaaggaaattgctacaaatgagaggcttgttgagcctcttatgagcctactgaagtcatatgagggtggcagagaaagccatgcacactttattgtgaagtcccttttcgaggactatctctcggttgaggaactattcagtgatggcattcagtctgatgtgattgaacgcctgcgccaacaacatagtaaagatctccagaaggttgtagacattgtgttgtctcaccagggtgtgagaaacaaaactaagctgatactaacactcatggagaaactggtctatccaaaccctgctgtctacaaggatcagttgactcgcttttcctccctcaatcacaaaagatattataagttggcccttaaagctagcgagcttcttgaacaaaccaagcttagtgagctccgcacaagcattgcaaggagcctttcagaacttgagatgtttactgaagaaaggacggccattagtgagatcatgggagatttagtgactgccccactgccagttgaagatgcactggtttctttgtttgattgtagtgatcaaactcttcagcagagggtgatcgagacgtacatatctcgattataccagcctcatcttgtcaaggatagtatccagctgaaatatcaggaatctggtgttattgctttatgggaattcgctgaagcgcattcagagaagagattgggtgctatggttattgtgaagtcgttagaatctgtatcagcagcaattggagctgcactaaagggtacatcacgctatgcaagctctgagggtaacataatgcatattgctttattgggtgctgataatcaaatgcatggaactgaagacagtggtgataacgatcaagctcaagtcaggatagacaaactttctgcgacactggaacaaaatactgtcacagctgatctccgtgctgctggtgtgaaggttattagttgcattgttcaaagggatggagcactcatgcctatgcgccataccttcctcttgtcggatgaaaagctttgttatggggaagagccggttctccggcatgtggagcctcctctttctgctcttcttgagttgggtaagttgaaagtgaaaggatacaatgaggtgaagtatacaccgtcacgtgatcgtcagtggaacatatacacacttagaaatacagagaaccccaaaatgttgcacagggtgtttttccgaactcttgtcaggcaacccggtgcttccaacaaattcacatcaggcaacatcagtgatgttgaagtgggaggagctgaggaatctctttcatttacatcgagcagcatattaagatcgctgatgactgctatagaagagttggagcttcacgcgattaggacaggtcactctcatatgtttttgtgcatattgaaagagcgaaagcttcttgatcttgttcccgtttcagggaacaaagttgtggatattggccaagatgaagctactgcatgcttgcttctgaaagaaatggctctacagatacatgaacttgtgggtgcaaggatgcatcatctttctgtatgccaatgggaggtgaaacttaagttggacagcgatgggcctgccagtggtacctggagagttgtaacaaccaatgttactagtcacacctgcactgtggatatctaccgtgaggttgaagatacagaatcacagaaactagtataccactctgctccatcgtcatctggtcctttgcatggcgttgcactgaatactccatatcagcctttgagtgttattgatctgaaacgttgctccgctagaaacaacagaactacatactgctatgattttccgttggcatttgaaactgcagtgcagaagtcatggtctaacatttctagtgacaataaccgatgttatgttaaagcaacggagctggtgtttgctcacaagaatgggtcatggggcactcctgtaattcctatggagcgtcctgctgggctcaatgacattggtatggtagcttggatcttggacatgtccactcctgaatatcccaatggcaggcagattgttgtcatcgcaaatgatattacttttagagctggatcgtttggtccaagggaagatgcattttttgaaactgttaccaacctagcttgtgagaggaggcttcctctcatctacttggcagcaaactctggtgctcggatcggcatagcagatgaagtaaaatcttgcttccgtgttggatggtctgatgatggcagccctgaacgtgggtttcaatatatttatctgactgaagaagaccatgctcgtattagcgcttctgttatagcgcacaagatgcagcttgataatggtgaaattaggtgggttattgattctgttgtagggaaggaggatgggctaggtgtggagaacatacatggaagtgctgctattgccagtgcctattctagggcctatgaggagacatttacgcttacatttgtgactggaaggactgttggaataggagcatatcttgctcgacttggcatacggtgcattcagcgtactgaccagcccattatcctaactgggttttctgccttgaacaagcttcttggccgggaagtgtacagctcccacatgcagttgggtggccccaaaattatggcgacaaacggtgttgtccatctgacagtttcagatgaccttgaaggtgtatctaatatattgaggtggctcagctatgttcctgccaacattggtggacctcttcctattacaaaatctttggacccacctgacagacccgttgcttacatccctgagaatacatgcgatcctcgtgctgccatcagtggcattgatgatagccaagggaaatggttggggggcatgttcgacaaagacagttttgtggagacatttgaaggatgggcgaagtcagttgttactggcagagcgaaactcggagggattccggtgggtgttatagctgtggagacacagactatgatgcagctcatccctgctgatccaggccagcttgattcccatgagcgatctgttcctcgtgctgggcaagtctggtttccagattcagctactaagacagcgcaggcaatgctggacttcaaccgtgaaggattacctctgttcatccttgctaactggagaggcttctctggtggacaaagagatctttttgaaggaatccttcaggctgggtcaacaattgttgagaaccttagggcatacaatcagcctgcctttgtatatatccccaaggctgcagagctacgtggaggggcttgggtcgtgattgatagcaagataaatccagatcgcattgagttctatgctgagaggactgcaaagggcaatgttctcgaacctcaagggttgatcgagatcaagttcaggtcagaggaactccaagagtgcatgggtaggcttgatccagaattgataaatctgaaggcaaagctccagggagtaaagcatgaaaatggaagtctacctgagtcagaatcccttcagaagagcatagaagcccggaagaaacagttgttgcctttgtatactcaaattgcggtacggttcgctgaattgcatgacacttcccttagaatggctgctaagggtgtgattaagaaggttgtagactgggaagattctaggtcgttcttctacaagagattacggaggaggatatccgaggatgttcttgcgaaggaaattagaggtgtaagtggcaagcagttttctcaccaatcggcaatcgagctgatccagaaatggtacttggcctctaagggagctgaaacaggaagcactgaatgggatgatgacgatgcttttgttgcctggagggaaaaccctgaaaactaccaggagtatatcaaagaacccagggctcaaagggtatctcagttgctctcagatgttgcagactccagtccagatctagaagccttgccacagggtctttctatgctactagagaagatggatcctgcaaagagggaaattgttgaagactttgaaataaaccttgtaaagtaa

SEQ ID NO: 55 - protein, 2235 aa, Saccharomyces cerevisiae
MEFSEESLFESSPQKMEYEITNYSERHTELPGHFIGLNTVDKLEESPLRDFVKSHGGHTVISKILIANNGIAAVKEIRSVRKWAYETFGDDRTVQFVAMATPEDLEANAEYIRMADQYIEVPGGTNNNNYANVDLIVDIAERADVDAVWAGWGHASENPLLPEKLSQSKRKVIFIGPPGNAMRSLGDKISSTIVAQSAKVPCIPWSGTGVDTVHVDEKTGLVSVDDDIYQKGCCTSPEDGLQKAKRIGFPVMIKASEGGGGKGIRQVEREEDFIALYHQAANEIPGSPIFIMKLAGRARHLEVQLLADQYGTNISLFGRDCSVQRRHQKIIEEAPVTIAKAETFHEMEKAAVRLGKLVGYVSAGTVEYLYSHDDGKFYFLELNPRLQVEHPTTEMVSGVNLPAAQLQIAMGIPMHRISDIRTLYGMNPHSASEIDFEFKTQDATKKQRRPIPKGHCTACRITSEDPNDGFKPSGGTLHELNFRSSSNVWGYFSVGNNGNIHSFSDSQFGHIFAFGENRQASRKHMVVALKELSIRGDFRTTVEYLIKLLETEDFEDNTITTGWLDDLITHKMTAEKPDPTLAVICGAATKAFLASEEARHKYIESLQKGQVLSKDLLQTMFPVDFIHEGKRYKFTVAKSGNDRYTLFINGSKCDIILRQLSDGGLLIAIGGKSHTIYWKEEVAATRLSVDSMTTLLEVENDPTQLRTPSPGKLVKFLVENGEHIIKGQPYAEIEVMKMQMPLVSQENGIVQLLKQPGSTIVAGDIMAIMTLDDPSKVKHALPFEGMLPDFGSPVIEGTKPAYKFKSLVSTLENILKGYDNQVIMNASLQQLIEVLRNPKLPYSEWKLHISALHSRLPAKLDEQMEELVARSLRRGAVFPARQLSKLIDMAVKNPEYNPDKLLGAVVEPLADIAHKYSNGLEAHEHSIFVHFLEEYYEVEKLFNGPNVREENIILKLRDENPKDLDKVALTVLSHSKVSAKNNLILAILKHYQPLCKLSSKVSAIFSTPLQHIVELESKATAKVALQAREILIQGALPSVKERTEQIEHILKSSVVKVAYGSSNPKRSEPDLNILKDLIDSNYVVFDVLLQFLTHQDPVVTAAAAQVYIRRAYRAYTIGDIRVHEGVTVPIVEWKFQLPSAAFSTFPTVKSKMGMNRAVSVSDLSYVANSQSSPLREGILMAVDHLDDVDEILSQSLEVIPRHQSSSNGPAPDRSGSSASLSNVANVCVASTEGFESEEEILVRLREILDLNKQELINASIRRITFMFGFKDGSYPKYYTFNGPNYNENETIRHIEPALAFQLELGRLSNFNIKPIFTDNRNIHVYEAVSKTSPLDKRFFTRGIIRTGHIRDDISIQEYLTSEANRLMSDILDNLEVTDTSNSDLNHIFINFIAVFDISPEDVEAAFGGFLERFGKRLLRLRVSSAEIRIIIKDPQTGAPVPLRALINNVSGYVIKTEMYTEVKNAKGEWVFKSLGKPGSMHLRPIATPYPVKEWLQPKRYKAHLMGTTYVYDFPELFRQASSSQWKNFSADVKLTDDFFISNELIEDENGELTEVEREPGANAIGMVAFKITVKTPEYPRGRQFVVVANDITFKIGSFGPQEDEFFNKVTEYARKRGIPRIYLAANSGARIGMAEEIVPLFQVAWNDAANPDKGFQYLYLTSEGMETLKKFDKENSVLTERTVINGEERFVIKTIIGSEDGLGVECLRGSGLIAGATSRAYHDIFTITLVTCRSVGIGAYLVRLGQRAIQVEGQPIILTGAPAINKMLGREVYTSNLQLGGTQIMYNNGVSHLTAVDDLAGVEKIVEWMSYVPAKRNMPVPILETKDTWDRPVDFTPTNDETYDVRWMIEGRETESGFEYGLFDKGSFFETLSGWAKGVVVGRARLGGIPLGVIGVETRTVENLIPADPANPNSAETLIQEPGQVWHPNSAFKTAQAINDFNNGEQLPMMILANWRGFSGGQRDMFNEVLKYGSFIVDALVDYKQPIIIYIPPTGELRGGSWVVVDPTINADQMEMYADVNARAGVLEPQGMVGIKFRREKLLDTMNRLDDKYRELRSQLSNKSLAPEVHQQISKQLADRERELLPIYGQISLQFADLHDRSSRMVAKGVISKELEWTEARRFFFWRLRRRLNEEYLIKRLSHQVGEASRLEKIARIRSWYPASVDHEDDRQVATWIEENYKTLDDKLKGLKLESFAQDLAKKIRSDHDNAIDGLSEVIKMLSTDDKEKLLKTLK

SEQ ID NO: 56 - DNA, 6708 bp, Artificial Sequence
  Codon-optimized S. cerevisiae acetyl Coa carboxylase (ACC1)
atggaattctccgaggaaagtttgttcgaaagcagtccgcagaaaatggaatatgaaattacgaattattcggaacgccacacggagctccccgggcacttcatcggactcaacaccgtggataagctcgaagaaagtcccctccgcgattttgtgaaaagccacggcggccataccgtgatctcgaagattctgattgccaataacggaattgccgctgtcaaggagatccgcagcgtccggaagtgggcgtacgaaacttttggcgatgaccgtacagtccagtttgttgctatggcgactccggaagacttggaggcgaatgcggaatacattcgaatggccgatcaatacatcgaagtccccggaggaacgaacaacaacaattatgcgaacgtcgatttgatcgtggatatcgcagaacgcgcggacgtggatgctgtttgggccggatggggccacgcttcggaaaaccctctgttgccggaaaaactcagccagtctaaacggaaagtcattttcatcggccctccgggcaacgcaatgcgctcgttgggtgataagatcagctcgaccattgtggctcagagcgctaaagtcccatgtattccctggtcgggtaccggcgtggatacggtccatgttgatgagaaaactggactggtcagcgtcgatgatgatatctaccaaaagggctgttgcaccagcccggaagatggcctgcaaaaggcgaagcgcatcgggttcccagtcatgatcaaggcatccgaaggcggaggcggtaagggtatccgccaggttgagcgtgaagaagattttatcgcactgtatcatcaagcggctaacgaaatcccgggctcgccaattttcattatgaaactggctggtcgggcgcgtcatctcgaagtgcaactcctcgctgaccagtacggtacgaacatctctttgttcggtcgggattgttcggtccagcgtcgtcaccagaagatcattgaagaagcccctgttaccatcgcaaaggccgagacgtttcatgagatggagaaagcggccgtccgcctcggcaagctggtcggttacgttagcgcaggcaccgtggaatacctctattcccacgacgatggtaagttttactttctcgaactgaatcctcgcctgcaggttgaacacccgaccacagagatggtgtcgggggtcaatctgccggctgcgcagttgcagattgcaatgggcattccgatgcatcgaatcagcgacatccgaaccctgtacggcatgaacccgcacagtgcgagcgaaatcgactttgagttcaagacccaagacgccacgaagaaacagcgacgcccaattccgaagggccattgcaccgcgtgtcgcattacctcggaggaccccaatgatggttttaagccctcgggcggtactctgcacgagctcaacttccgctcctcctcgaacgtctggggctatttcagcgtcggaaataatggtaacattcatagtttttccgattcccaatttggccatatcttcgcctttggcgaaaaccgacaagctagccgcaaacacatggtcgtggcgttgaaggagctgagtatccgaggggactttcgcacgacggtggaatatctgatcaaactgctcgaaacggaggactttgaggataacacaattaccaccggatggttggacgacctgattacgcacaaaatgaccgccgagaaacccgaccccaccttggcagtgatttgtggcgcggcaacgaaggcctttttggcctctgaagaggcacgccacaagtacattgagagtctccaaaagggtcaggtgctgagtaaagatctgctgcaaaccatgtttcctgtcgactttattcatgaggggaaacgctacaaattcacggttgctaagtctggtaatgatcggtacacattgtttatcaatggatcgaagtgcgatattatcttgcgacaactctccgacggcggcctcctgattgctatcggcgggaaaagtcataccatctattggaaagaagaggtcgccgccacccgactgagcgttgattcgatgactactctgctcgaagttgaaaacgatccaacgcaactgcgcactccctctccgggtaagctcgtgaagtttctcgtcgagaatggcgaacacattattaagggccagccgtatgcggaaatcgaggtgatgaagatgcagatgcccctggtcagccaagagaacggtattgtgcaactgctgaaacagcccggcagcaccatcgtcgctggcgatatcatggctatcatgaccctcgatgatccttccaaagtcaaacatgccctgcccttcgaaggcatgctccccgattttggctcccccgtgattgagggcaccaaaccagcttacaagtttaaatcgctggtttccaccctcgagaacatcttgaagggctacgataatcaggtcattatgaatgccagcctccagcagctcattgaggtcctccgtaaccccaagctgccctacagtgaatggaagctccacatcagtgcgctccactcgcgactgcccgcgaagctcgatgagcagatggaagagctcgtcgctcgcagcctgcgtcgcggcgcagtctttccggcacggcaactgtcgaagctcatcgatatggctgtcaaaaaccccgaatacaaccccgataaactcttgggtgctgtcgttgagccgctcgccgatatcgcgcacaagtacagtaatggcctggaggcgcacgaacacagtatctttgttcacttcctggaagaatactatgaggttgagaaactgttcaatgggcctaatgtccgggaagagaatattatcctgaagctccgtgatgaaaatccgaaagatttggataaagtcgccttgacggtgctcagtcatagcaaggtgagtgccaagaacaatctcatcctggcgatcttgaaacactaccaacctttgtgcaagctgagttccaaggtgtcggctatttttagtacgcccctgcagcacatcgtggaactcgaaagtaaagccaccgccaaggtggctctgcaggcccgggagattctgatccagggtgctctgccgagcgtgaaagagcggacggaacaaatcgaacacatcctgaagagttcggtcgtgaaggttgcatatggcagcagtaaccctaaacgctcggaaccggacctcaatatcctgaaggatctgatcgatagtaattatgttgtttttgatgtcctgctccaatttctgactcaccaagatccggttgttactgcggctgccgcgcaagtttacattcgacgcgcctatcgcgcctacacaatcggcgatattcgagtccatgagggcgtgaccgttccaatcgttgaatggaaattccagttgccatcggcggctttttctacattcccaacagtcaagagtaagatgggcatgaatcgtgccgtttcggtcagtgatttgtcctatgtcgcaaactcgcaatctagtcctctgcgagagggcatcctgatggcagtggatcatttggatgatgtcgatgagatcctctcgcaaagtctcgaggtcattcctcgccaccaatcgtcgtccaatggcccagctcccgatcgatccggttcttccgccagcttgtcgaatgtcgccaacgtctgtgtggcgtcgactgaggggttcgaaagcgaagaagaaattttggtccgcttgcgggaaattttggacctcaacaagcaggaactgattaatgcctctattcgccgcattacgtttatgttcggtttcaaggatggctcgtacccaaaatactatacgttcaacggcccgaactacaatgagaacgagactatccgacatattgaacctgccctcgctttccaactggaactggggcggctctcgaatttcaatattaagcctatttttaccgacaaccgtaacatccacgtttacgaggctgtcagcaaaacaagcccgctggataagcgattcttcacccggggcattatccgcacaggccacatccgtgacgatatcagtatccaagaatacctgactagcgaagctaaccgcttgatgagcgacattttggataatctggaagtgactgatacttccaacagcgacttgaatcacatttttatcaacttcattgccgtgttcgatatctcgccggaagatgtggaagccgcgtttggaggctttctggaacggtttggcaaacggctgctgcgcttgcgggtgtctagcgcggagattcggattatcatcaaagatccgcaaacgggggctcctgtgccactgcgcgcgctgattaataacgtctcgggttacgtgatcaagaccgagatgtacacagaggttaaaaacgctaaaggcgagtgggtcttcaagagcttgggcaaacccggcagcatgcatctccgccccatcgccacgccgtatccggtcaaggagtggctgcagcccaagcgatacaaggcgcacttgatggggacgacatatgtttacgattttcctgaactgttccgtcaagcaagcagctcccagtggaaaaacttttccgcagatgtgaaattgactgatgatttcttcatctcgaatgagctcatcgaagatgagaatggcgagctgaccgaagttgagcgagaacctggtgccaatgcgattgggatggtcgcctttaaaatcacggtcaaaactcccgagtaccctcggggtcgccagttcgtcgttgtggctaacgatatcacctttaagattggatcgtttggcccgcaggaggatgagttctttaacaaggtcactgaatacgcccgaaaacgaggcattccgcggatttacttggcagccaatagcggtgcgcgcatcggcatggctgaagaaatcgttccgctgtttcaggttgcctggaacgacgcggccaaccccgacaaggggttccagtacttgtatctgacttccgaaggcatggagacgttgaagaaatttgataaggagaatagtgtcttgactgagcggaccgttattaacggcgaggagcggtttgtcattaagactatcatcggcagcgaagatggcctcggcgtcgaatgtttgcgcgggtccggcctgatcgcaggggcaacctcgcgagcctatcacgatatctttaccattactttggtcacgtgtcgttcggttggcattggagcatacctcgtgcgcctcggtcagcgcgccatccaagtggaaggccaacctatcattttgactggcgcgcctgctatcaataagatgctgggccgtgaagtctacacatcgaacctccaactgggcggtacccaaattatgtataacaatggcgtcagccatctgacagccgtcgatgacctggctggcgttgaaaagattgttgagtggatgagctatgtgcccgccaaacggaacatgccagtccccattttggaaaccaaggatacctgggatcgcccagtggatttcactccgactaatgatgaaacctacgatgtccgctggatgatcgaagggcgcgaaactgagtcgggcttcgagtacggactgtttgataagggtagtttctttgagactctcagtggttgggccaaaggcgttgtcgtcggtcgggcacgtctgggcggcatcccgctgggagttattggtgttgagacacgtacggtggaaaatctgatcccggctgatccggccaaccccaatagtgcggaaacgctgattcaagagcccgggcaagtgtggcacccgaatagtgcctttaagacggcgcaggctattaatgattttaacaacggcgaacaactgcctatgatgattctggcgaattggcgggggtttagtggtgggcagcgcgacatgttcaacgaagtgctcaagtacggctccttcatcgtggacgccctggtcgactataaacaaccaattatcatctatattccccctaccggcgagctgcgaggcggtagctgggtcgtggtggaccctactattaatgcagatcaaatggagatgtacgccgacgtgaatgctcgagcgggcgtgctggaaccacaagggatggttggcatcaaattccgccgcgaaaaactgttggatactatgaatcgactggatgataaatatcgcgagctgcgcagccaactgtcgaacaagtctctggccccggaagtccatcaacagatttctaaacagctggcagatcgcgaacgtgaactcttgccgatctacggccaaatcagcctccaatttgccgacctgcatgatcgcagcagccgcatggttgcgaaaggtgtcatcagcaaagagctcgagtggacggaagctcggcggtttttcttttggcggctgcgccgacgcctgaatgaagaatacttgattaagcgtctgagccaccaggtcggcgaggctagtcggttggaaaagatcgcccgcattcggagttggtatccggcatcggttgaccacgaggacgatcgccaggtcgctacctggatcgaagagaactacaaaaccttggatgataagctgaaaggactgaagctggagtctttcgcccaagatctcgccaagaagatccgtagcgatcatgacaatgcaatcgacggtttgagcgaggttatcaagatgttgtctaccgacgacaaggagaagctgctcaaaacgctgaagtag

SEQ ID NO: 57 - DNA, 6702 bp, Artificial Sequence
  Synthetic construct Saccharomyces cerevisiae clone FLH148869.01X ACC1
atgagcgaagaaagcttattcgagtcttctccacagaagatggagtacgaaattacaaactactcagaaagacatacagaacttccaggtcatttcattggcctcaatacagtagataaactagaggagtccccgttaagggactttgttaagagtcacggtggtcacacggtcatatccaagatcctgatagcaaataatggtattgccgccgtgaaagaaattagatccgtcagaaaatgggcatacgagacgttcggcgatgacagaaccgtccaattcgtcgccatggccaccccagaagatctggaggccaacgcagaatatatccgtatggccgatcaatacattgaagtgccaggtggtactaataataacaactacgctaacgtagacttgatcgtagacatcgccgaaagagcagacgtagacgccgtatgggctggctggggtcacgcctccgagaatccactattgcctgaaaaattgtcccagtctaagaggaaagtcatctttattgggcctccaggtaacgccatgaggtctttaggtgataaaatctcctctaccattgtcgctcaaagtgctaaagtcccatgtattccatggtctggtaccggtgttgacaccgttcacgtggacgagaaaaccggtctggtctctgtcgacgatgacatctatcaaaagggttgttgtacctctcctgaagatggtttacaaaaggccaagcgtattggttttcctgtcatgattaaggcatccgaaggtggtggtggtaaaggtatcagacaagttgaacgtgaagaagatttcatcgctttataccaccaggcagccaacgaaattccaggctcccccattttcatcatgaagttggccggtagagcgcgtcacttggaagttcaactgctagcagatcagtacggtacaaatatttccttgttcggtagagactgttccgttcagagacgtcatcaaaaaattatcgaagaagcaccagttacaattgccaaggctgaaacatttcacgagatggaaaaggctgccgtcagactggggaaactagtcggttatgtctctgccggtaccgtggagtatctatattctcatgatgatggaaaattctactttttagaattgaacccaagattacaagtcgagcatccaacaacggaaatggtctccggtgttaacttacctgcagctcaattacaaatcgctatgggtatccctatgcatagaataagtgacattagaactttatatggtatgaatcctcattctgcctcagaaatcgatttcgaattcaaaactcaagatgccaccaagaaacaaagaagacctattccaaagggtcattgtaccgcttgtcgtatcacatcagaagatccaaacgatggattcaagccatcgggtggtactttgcatgaactaaacttccgttcttcctctaatgtttggggttacttctccgtgggtaacaatggtaatattcactccttttcggactctcagttcggccatatttttgcttttggtgaaaatagacaagcttccaggaaacacatggttgttgccctgaaggaattgtccattaggggtgatttcagaactactgtggaatacttgatcaaacttttggaaactgaagatttcgaggataacactattaccaccggttggttggacgatttgattactcataaaatgaccgctgaaaagcctgatccaactcttgccgtcatttgcggtgccgctacaaaggctttcttagcatctgaagaagcccgccacaagtatatcgaatccttacaaaagggacaagttctatctaaagacctactgcaaactatgttccctgtagattttatccatgagggtaaaagatacaagttcaccgtagctaaatccggtaatgaccgttacacattatttatcaatggttctaaatgtgatatcatactgcgtcaactatctgatggtggtcttttgattgccataggcggtaaatcgcataccatctattggaaagaagaagttgctgctacaagattatccgttgactctatgactactttgttggaagttgaaaacgatccaacccagttgcgtactccatcccctggtaaattggttaaattcttggtggaaaatggtgaacacattatcaagggccaaccatatgcagaaattgaagttatgaaaatgcaaatgcctttggtttctcaagaaaatggtatcgtccagttattaaagcaacctggttctaccattgttgcaggtgatatcatggctattatgactcttgacgatccatccaaggtcaagcacgctctaccatttgaaggtatgctgccagattttggttctccagttatcgaaggaaccaaacctgcctataaattcaagtcattagtgtctactttggaaaacattttgaagggttatgacaaccaagttattatgaacgcttccttgcaacaattgatagaggttttgagaaatccaaaactgccttactcagaatggaaactacacatctctgctttacattcaagattgcctgctaagctagatgaacaaatggaagagttagttgcacgttctttgagacgtggtgctgttttcccagctagacaattaagtaaattgattgatatggccgtgaagaatcctgaatacaaccccgacaaattgctgggcgccgtcgtggaaccattggcggatattgctcataagtactctaacgggttagaagcccatgaacattctatatttgtccatttcttggaagaatattacgaagttgaaaagttattcaatggtccaaatgttcgtgaggaaaatatcattctgaaattgcgtgatgaaaaccctaaagatctagataaagttgcgctaactgttttgtctcattcgaaagtttcagcgaagaataacctgatcctagctatcttgaaacattatcaaccattgtgcaagttatcttctaaagtttctgccattttctctactcctctacaacatattgttgaactagaatctaaggctaccgctaaggtcgctctacaagcaagagaaattttgattcaaggcgctttaccttcggtcaaggaaagaactgaacaaattgaacatatcttaaaatcctctgttgtgaaggttgcctatggctcatccaatccaaagcgctctgaaccagatttgaatatcttgaaggacttgatcgattctaattacgttgtgttcgatgttttacttcaattcctaacccatcaagacccagttgtgactgctgcagctgctcaagtctatattcgtcgtgcttatcgtgcttacaccataggagatattagagttcacgaaggtgtcacagttccaattgttgaatggaaattccaactaccttcagctgcgttctccacctttccaactgttaaatctaaaatgggtatgaacagggctgtttctgtttcagatttgtcatatgttgcaaacagtcagtcatctccgttaagagaaggtattttgatggctgtggatcatttagatgatgttgatgaaattttgtcacaaagtttggaagttattcctcgtcaccaatcttcttctaacggacctgctcctgatcgttctggtagctccgcatcgttgagtaatgttgctaatgtttgtgttgcttctacagaaggtttcgaatctgaagaggaaattttggtaaggttgagagaaattttggatttgaataagcaggaattaatcaatgcttctatccgtcgtatcacatttatgttcggttttaaagatgggtcttatccaaagtattatacttttaacggtccaaattataacgaaaatgaaacaattcgtcacattgagccggctttggccttccaactggaattaggaagattgtccaacttcaacattaaaccaattttcactgataatagaaacatccatgtctacgaagctgttagtaagacttctccattggataagagattctttacaagaggtattattagaacgggtcatatccgtgatgacatttctattcaagaatatctgacttctgaagctaacagattgatgagtgatatattggataatttagaagtcaccgacacttcaaattctgatttgaatcatatcttcatcaacttcattgcggtgtttgatatctctccagaagatgtcgaagccgccttcggtggtttcttagaaagatttggtaagagattgttgagattgcgtgtttcttctgccgaaattagaatcatcatcaaagatcctcaaacaggtgccccagtaccattgcgtgccttgatcaataacgtttctggttatgttatcaaaacagaaatgtacaccgaagtcaagaacgcaaaaggtgaatgggtatttaagtctttgggtaaacctggatccatgcatttaagacctattgctactccttaccctgttaaggaatggttgcaaccaaaacgttataaggcacacttgatgggtaccacatatgtctatgacttcccagaattattccgccaagcatcgtcatcccaatggaaaaatttctctgcagatgttaagttaacagatgatttctttatttccaacgagttgattgaagatgaaaacggcgaattaactgaggtggaaagagaacctggtgccaacgctattggtatggttgcctttaagattactgtaaagactcctgaatatccaagaggccgtcaatttgttgttgttgctaacgatatcacattcaagatcggttcctttggtccacaagaagacgaattcttcaataaggttactgaatatgctagaaagcgtggtatcccaagaatttacttggctgcaaactcaggtgccagaattggtatggctgaagagattgttccactatttcaagttgcatggaatgatgctgccaatccggacaagggcttccaatacttatacttaacaagtgaaggtatggaaactttaaagaaatttgacaaagaaaattctgttctcactgaacgtactgttataaacggtgaagaaagatttgtcatcaagacaattattggttctgaagatgggttaggtgtcgaatgtctacgtggatctggtttaattgctggtgcaacgtcaagggcttaccacgatatcttcactatcaccttagtcacttgtagatccgtcggtatcggtgcttatttggttcgtttgggtcaaagagctattcaggtcgaaggccagccaattattttaactggtgctcctgcaatcaacaaaatgctgggtagagaagtttatacttctaacttacaattgggtggtactcaaatcatgtataacaacggtgtttcacatttgactgctgttgacgatttagctggtgtagagaagattgttgaatggatgtcttatgttccagccaagcgtaatatgccagttcctatcttggaaactaaagacacatgggatagaccagttgatttcactccaactaatgatgaaacttacgatgtaagatggatgattgaaggtcgtgagactgaaagtggatttgaatatggtttgtttgataaagggtctttctttgaaactttgtcaggatgggccaaaggtgttgtcgttggtagagcccgtcttggtggtattccactgggtgttattggtgttgaaacaagaactgtcgagaacttgattcctgctgatccagctaatccaaatagtgctgaaacattaattcaagaacctggtcaagtttggcatccaaactccgccttcaagactgctcaagctatcaatgactttaacaacggtgaacaattgccaatgatgattttggccaactggagaggtttctctggtggtcaacgtgatatgttcaacgaagtcttgaagtatggttcgtttattgttgacgcattggtggattacaaacaaccaattattatctatatcccacctaccggtgaactaagaggtggttcatgggttgttgtcgatccaactatcaacgctgaccaaatggaaatgtatgccgacgtcaacgctagagctggtgttttggaaccacaaggtatggttggtatcaagttccgtagagaaaaattgctggacaccatgaacagattggatgacaagtacagagaattgagatctcaattatccaacaagagtttggctccagaagtacatcagcaaatatccaagcaattagctgatcgtgagagagaactattgccaatttacggacaaatcagtcttcaatttgctgatttgcacgataggtcttcacgtatggtggccaagggtgttatttctaaggaactggaatggaccgaggcacgtcgtttcttcttctggagattgagaagaagattgaacgaagaatatttgattaaaaggttgagccatcaggtaggcgaagcatcaagattagaaaagatcgcaagaattagatcgtggtaccctgcttcagtggaccatgaagatgataggcaagtcgcaacatggattgaagaaaactacaaaactttggacgataaactaaagggtttgaaattagagtcattcgctcaagacttagctaaaaagatcagaagcgaccatgacaatgctattgatggattatctgaagttatcaagatgttatctaccgatgataaagaaaaattgttgaagactttgaaatag

SEQ ID NO: 58 - protein, 458 aa, Acinetobacter baylii sp.
MRPLHPIDFIFLSLEKRQQPMHVGGLFLFQIPDNAPDTFIQDLVNDIRISKSIPVPPFNNKLNGLFWDEDEEFDLDHHFRHIALPHPGRIRELLIYISQEHSTLLDRAKPLWTCNIIEGIEGNRFAMYFKIHHAMVDGVAGMRLIEKSLSHDVTEKSIVPPWCVEGKRAKRLREPKTGKIKKIMSGIKSQLQATPTVIQELSQTVFKDIGRNPDHVSSFQAPCSILNQRVSSSRRFAAQSFDLDRFRNIAKSLNVTINDVVLAVCSGALRAYLMSHNSLPSKPLIAMVPASIRNDDSDVSNRITMILANLATHKDDPLQRLEIIRRSVQNSKQRFKRMTSDQILNYSAVVYGPAGLNIISGMMPKRQAFNLVISNVPGPREPLYWNGAKLDALYPASIVLDGQALNITMTSYLDKLEVGLIACRNALPRMQNLLTHLEEEIQLFEGVIAKQEDIKTAN

SEQ ID NO: 59 - protein, 446 aa, Streptomyces coelicolor
MTPDPLAPLDLAFWNIESAEHPMHLGALGVFEADSPTAGALAADLLAARAPAVPGLRMRIRDTWQPPMALRRPFAFGGATREPDPRFDPLDHVRLHAPATDFHARAGRLMERPLERGRPPWEAHVLPGADGGSFAVLFKFHHALADGLRALTLAAGVLDPMDLPAPRPRPEQPPRGLLPDVRALPDRLRGALSDAGRALDIGAAAALSTLDVRSSPALTAASSGTRRTAGVSVDLDDVHHVRKTTGGTVNDVLIAVVAGALRRWLDERGDGSEGVAPRALIPVSRRRPRSAHPQGNRLSGYLMRLPVGDPDPLARLGTVRAAMDRNKDAGPGRGAGAVALLADHVPALGHRLGGPLVSGAARLWFDLLVTSVPLPSLGLRLGGHPLTEVYPLAPLARGHSLAVAVSTYRGRVHYGLLADAKAVPDLDRLAVAVAEEVETLLTACRP

SEQ ID NO: 60 - protein, 457 aa, Alcanivorax borkumensis
MKALSPVDQLFLWLEKRQQPMHVGGLQLFSFPEGAGPKYVSELAQQMRDYCHPVAPFNQRLTRRLGQYYWTRDKQFDIDHHFRHEALPKPGRIRELLSLVSAEHSNLLDRERPMWEAHLIEGIRGRQFALYYKIHHSVMDGISAMRIASKTLSTDPSEREMAPAWAFNTKKRSRSLPSNPVDMASSMARLTASISKQAATVPGLAREVYKVTQKAKKDENYVSIFQAPDTILNNTITGSRRFAAQSFPLPRLKVIAKAYNCTINTVVLSMCGHALREYLISQHALPDEPLIAMVPMSLRQDDSTGGNQIGMILANLGTHICDPANRLRVIHDSVEEAKSRFSQMSPEEILNFTALTMAPTGLNLLTGLAPKWRAFNVVISNIPGPKEPLYWNGAQLQGVYPVSIALDRIALNITLTSYVDQMEFGLIACRRTLPSMQRLLDYLEQSIRELEIGAGIK

SEQ ID NO: 61 - protein, 460 aa, Acinetobacter baylii sp.
MEFRPLHPIDFIFLSLEKRQQPMHVGGLFLFQIPDNAPDTFIQDLVNDIRISKSIPVPPFNNKLNGLFWDEDEEFDLDHHFRHIALPHPGRIRELLIYISQEHSTLLDRAKPLWTCNIIEGIEGNRFAMYFKIHHAMVDGVAGMRLIEKSLSHDVTEKSIVPPWCVEGKRAKRLREPKTGKIKKIMSGIKSQLQATPTVIQELSQTVFKDIGRNPDHVSSFQAPCSILNQRVSSSRRFAAQSFDLDRFRNIAKSLNVTINDVVLAVCSGALRAYLMSHNSLPSKPLIAMVPASIRNDDSDVSNRITMILANLATHKDDPLQRLEIIRRSVQNSKQRFKRMTSDQILNYSAVVYGPAGLNIISGMMPKRQAFNLVISNVPGPREPLYWNGAKLDALYPASIVLDGQALNITMTSYLDKLEVGLIACRNALPRMQNLLTHLEEEIQLFEGVIAKQEDIKTAN

SEQ ID NO: 62 - DNA, 1377 bp, Artificial Sequence
  Codon-optimized Acinetobacter baylii sp. atfA
atgcggcccttgcaccccattgacttcatctttctgagtttggagaaacggcaacagcccatgcatgtcggtggcttgtttctcttccaaatccccgataacgccccggacacctttattcaggatctggtcaatgatatccggatctcgaaatcgatccccgtgccgccgtttaataataaactgaacggcctcttttgggacgaagacgaggaatttgatctggatcaccattttcggcacatcgctttgccccacccgggtcggattcgcgaactcctgatctatattagccaagaacacagcacgttgttggaccgggccaaaccgctctggacgtgcaatatcatcgaaggcatcgaaggcaaccgctttgcgatgtacttcaagattcatcacgcgatggttgacggtgtcgctggcatgcgcctgatcgaaaaatcgctgagccatgatgtgaccgaaaagagtatcgtccccccctggtgcgtggaaggtaagcgcgccaagcgcctccgcgaaccgaaaacgggcaagattaagaaaatcatgagcggtatcaagtcgcagctgcaggctaccccgaccgtgatccaggagctgtcgcaaaccgtgtttaaggatattggtcggaacccggatcatgtcagtagtttccaagctccctgttcgatcttgaatcagcgcgttagcagcagccgccggttcgctgctcaaagttttgatctcgatcggtttcggaatattgccaagtcgctgaacgtcaccatcaatgatgtggttctcgcggtttgttcgggtgccctccgcgcgtatctgatgagccataacagtctccccagtaagccgctgattgctatggttcccgcgtcgattcggaatgacgacagcgatgtgagcaaccggattaccatgatcctggctaacctcgcgacccacaaagatgatccgttgcaacgcctggagattatccgccgcagtgtgcagaacagtaaacagcgcttcaaacggatgaccagtgatcaaattctgaattacagcgctgtggtctatggtcccgccggcttgaatattatcagtggtatgatgcccaaacgccaagcgtttaacttggtgatcagtaatgtgccgggtccgcgcgaacccttgtattggaacggtgctaaactcgatgccctctaccccgccagtatcgtgctcgatggccaggctctcaatattaccatgaccagctatctcgataaactcgaggtgggtttgattgcgtgccgcaacgcgctgccccgcatgcagaacttgctgacccacctggaagaggaaatccagctcttcgagggcgtgattgcgaagcaggaagatattaaaacggccaactag

SEQ ID NO: 63 - DNA, 1376 bp, Acinetobacter sp.
atgcgcccattacatccgattgattttatattcctgtcactagaaaaaagacaacagcctatgcatgtaggtggtttatttttgtttcagattcctgataacgccccagacacctttattcaagatctggtgaatgatatccggatatcaaaatcaatccctgttccaccattcaacaataaactgaatgggcttttttgggatgaagatgaagagtttgatttagatcatcattttcgtcatattgcactgcctcatcctggtcgtattcgtgaattgcttatttatatttcacaagagcacagtacgctgctagatcgggcaaagcccttgtggacctgcaatattattgaaggaattgaaggcaatcgttttgccatgtacttcaaaattcaccatgcgatggtcgatggcgttgctggtatgcggttaattgaaaaatcactctcccatgatgtaacagaaaaaagtatcgtgccaccttggtgtgttgagggaaaacgtgcaaagcgcttaagagaacctaaaacaggtaaaattaagaaaatcatgtctggtattaagagtcagcttcaggcgacacccacagtcattcaagagctttctcagacagtatttaaagatattggacgtaatcctgatcatgtttcaagctttcaggcgccttgttctattttgaatcagcgtgtgagctcatcgcgacgttttgcagcacagtcttttgacctagatcgttttcgtaatattgccaaatcgttgaatgtgaccattaatgatgttgtactagcggtatgttctggtgcattacgtgcgtatttgatgagtcataatagtttgccttcaaaaccattaattgccatggttccagcctctattcgcaatgacgattcagatgtcagcaaccgtattacgatgattctggcaaatttggcaacccacaaagatgatcctttacaacgtcttgaaattatccgccgtagtgttcaaaactcaaagcaacgcttcaaacgtatgaccagcgatcagattctaaattatagtgctgtcgtatatggccctgcaggactcaacataatttctggcatgatgccaaaacgccaagccttcaatctggttatttccaatgtgcctggcccaagagagccactttactggaatggtgccaaacttgatgcactctacccagcttcaattgtattagacggtcaagcattgaatattacaatgaccagttatttagataaacttgaagttggtttgattgcatgccgtaatgcattgccaagaatgcagaatttactgacacatttagaagaagaaattcaactatttgaaggcgtaattgcaaagcaggaagatattaaaacagccaatta

SEQ ID NO: 64 - DNA, 1341 bp, Artificial Sequence
  Codon-optimized Streptomyces coelicolor DGAT
atgacgcctgacccgttggctcccttggacttggctttctggaatatcgaaagtgccgagcacccgatgcacttgggggcactgggggtctttgaggcggatagtccaaccgctggtgcactcgccgcggatctcctggctgcccgcgctcccgcagtgcccgggctgcgcatgcggattcgcgatacatggcagccgcctatggcgctccgtcgcccttttgcttttggcggtgctacacgcgagcccgacccgcggtttgatccactcgatcatgtgcggctccatgccccagcgacggatttccacgcacgcgcaggtcggttgatggagcgccctctggaacgaggccgtcctccttgggaagcccatgtcctgccaggggctgacggtggatcgtttgcggtcttgtttaagttccatcatgccctggccgacggtctgcgggcgctgacgctggcggcgggcgtgctcgatccgatggatctccccgctccacggccccgcccagagcagcccccccgtggtctcctgccggatgtccgcgcgctgccggatcggctgcgaggggctctgtctgacgcgggccgcgcgttggacatcggcgccgccgcagccctcagcaccctggatgtgcggagcagtcccgctctgactgcggcgtcctcgggcacgcgacgtaccgccggcgtgtccgtggatctcgacgacgtgcaccatgttcgcaaaacgacaggcggtaccgttaacgatgttttgatcgccgttgttgccggggccctgcgacgctggctggatgaacgaggcgatgggtcggaaggcgtcgccccgcgcgccctcattcccgtcagccggcggcgacctcggagcgcacacccgcaaggcaaccgattgagtggctacctgatgcgcttgccggtcggcgacccggaccctctcgcacggttgggaaccgtccgtgccgcgatggatcgaaataaggatgcggggcccggccgcggagctggcgcagttgctctcttggcagaccacgttcctgccctgggccaccgcctgggtggacccctcgtctcgggcgctgctcgactgtggttcgatctgttggtcacgagcgtcccgttgccctctttgggtttgcgcctcggtgggcatccgctgaccgaagtgtacccactggcccccctggcccgtggccactccttggcggtggcggtgagcacttatcgcggtcgggttcattacggtctcctcgctgatgctaaagccgttcctgatctggatcgtctggcagtggccgtcgccgaggaggttgaaaccttgctcactgcgtgccgcccctag

SEQ ID NO: 65 - DNA, 1374 bp, Artificial Sequence
  Codon-optimized Alcanivorax borkumensis DGAT
atgaaagctttgagccccgttgatcagctgtttctgtggttggaaaaacggcagcaacccatgcatgtgggtgggttgcagctgttctcctttcccgaaggcgcggggccgaaatatgtctcggaactggcccaacagatgcgcgattattgtcaccctgtcgccccgttcaaccaacgtctgacacggcgcctggggcaatactactggacacgtgataagcaatttgacattgaccatcattttcggcacgaggccctgcccaaaccgggtcggattcgcgagttgctcagcttggtgagtgcggaacactccaacttgttggatcgtgaacgacccatgtgggaagcgcacctgatcgaaggaatccgcgggcgccaatttgccttgtattacaaaattcatcactccgtcatggacggtatctccgctatgcggattgcctctaagaccttgtccacggaccccagtgagcgggagatggcccccgcttgggcgtttaatactaagaagcgatcgcgcagcctgccaagcaatcccgtggatatggcgagctcgatggctcgactcactgcaagtatttcgaaacaagctgccaccgtgcccggcctggcacgagaggtctacaaggtgacccaaaaagctaaaaaggatgaaaattacgttagtattttccaagcaccagacaccatcctcaataatacgattacgggcagtcgacgcttcgccgctcagtcgttccctctcccccgtctgaaggttatcgctaaggcttacaactgcactattaacacggttgtgctctcgatgtgcggccacgccctgcgcgaatacctcatcagtcaacatgccctgccggatgaacccctgatcgcgatggtccctatgagcctgcgccaagatgatagcaccggaggcaaccagatcggaatgattttggcgaatctgggcacgcatatctgcgatcctgccaatcgcctgcgtgtcatccatgatagcgtggaggaggcgaaaagccgttttagccaaatgtctccggaggagattctgaactttacagcactcactatggcgccgaccggtctgaacttgctcaccggtttggctcccaaatggcgcgcatttaacgtcgttatctctaacatcccagggccaaaggaaccactgtactggaatggggcacagctccagggtgtgtatccggtctccatcgccttggatcggattgccctgaacattacactgacgtcttatgttgatcagatggagttcggcttgattgcgtgtcgccggaccctcccgtcgatgcaacgactcctcgactatctcgaacagagtatccgcgaactggagattggcgcgggcatcaaatag

SEQ ID NO: 66 - DNA, 1383 bp, Artificial Sequence
  Codon-optimized Acinetobacter baylii sp. DGATd
atggaattccggcccttgcaccccattgacttcatctttctgagtttggagaaacggcaacagcccatgcatgtcggtggcttgtttctcttccaaatccccgataacgccccggacacctttattcaggatctggtcaatgatatccggatctcgaaatcgatccccgtgccgccgtttaataataaactgaacggcctcttttgggacgaagacgaggaatttgatctggatcaccattttcggcacatcgctttgccccacccgggtcggattcgcgaactcctgatctatattagccaagaacacagcacgttgttggaccgggccaaaccgctctggacgtgcaatatcatcgaaggcatcgaaggcaaccgctttgcgatgtacttcaagattcatcacgcgatggttgacggtgtcgctggcatgcgcctgatcgaaaaatcgctgagccatgatgtgaccgaaaagagtatcgtccccccctggtgcgtggaaggtaagcgcgccaagcgcctccgcgaaccgaaaacgggcaagattaagaaaatcatgagcggtatcaagtcgcagctgcaggctaccccgaccgtgatccaggagctgtcgcaaaccgtgtttaaggatattggtcggaacccggatcatgtcagtagtttccaagctccctgttcgatcttgaatcagcgcgttagcagcagccgccggttcgctgctcaaagttttgatctcgatcggtttcggaatattgccaagtcgctgaacgtcaccatcaatgatgtggttctcgcggtttgttcgggtgccctccgcgcgtatctgatgagccataacagtctccccagtaagccgctgattgctatggttcccgcgtcgattcggaatgacgacagcgatgtgagcaaccggattaccatgatcctggctaacctcgcgacccacaaagatgatccgttgcaacgcctggagattatccgccgcagtgtgcagaacagtaaacagcgcttcaaacggatgaccagtgatcaaattctgaattacagcgctgtggtctatggtcccgccggcttgaatattatcagtggtatgatgcccaaacgccaagcgtttaacttggtgatcagtaatgtgccgggtccgcgcgaacccttgtattggaacggtgctaaactcgatgccctctaccccgccagtatcgtgctcgatggccaggctctcaatattaccatgaccagctatctcgataaactcgaggtgggtttgattgcgtgccgcaacgcgctgccccgcatgcagaacttgctgacccacctggaagaggaaatccagctcttcgagggcgtgattgcgaagcaggaagatattaaaacggccaactag

SEQ ID NO: 67 - DNA, 2535 bp, Synechococcus elongatus PCC 7942
atgagtgattccaccgcccaactcagctacgaccccaccacgagctacctcgagcccagtggcttggtctgtgaggatgaacggacttctgtgactcccgagaccttgaaacgggcttacgaggcccatctctactacagccagggcaaaacctcagcgatcgccaccctgcgtgatcactacatggcactggcctacatggtccgcgatcgcctcctgcaacggtggctagcttcactgtcgacctatcaacaacagcacgtcaaagtggtctgttacctgtccgctgagtttttgatgggtcggcacctcgaaaactgcctgatcaacctgcatcttcacgaccgcgttcagcaagttttggatgaactgggtctcgattttgagcaactgctagagaaagaggaagaacccgggctaggcaacggtggcctcggtcgcctcgcagcttgtttcctcgactccatggctaccctcgacattcctgccgtcggctatggcattcgctatgagttcggtatcttccaccaagaactccacaacggctggcagatcgaaatccccgataactggctgcgctttggcaacccttgggagctagagcggcgcgaacaggccgtggaaattaagttgggcggccacacggaggcctaccacgatgcgcgaggccgctactgcgtctcttggatccccgatcgcgtcattcgcgccatcccctacgacacccccgtaccgggctacgacaccaataacgtcagcatgttgcggctctggaaggctgagggcaccacggaactcaaccttgaggctttcaactcaggcaactacgacgatgcggttgccgacaaaatgtcgtcggaaacgatctcgaaggtgctctatcccaacgacaacaccccccaagggcgggaactgcggctggagcagcagtatttcttcgtctcggcttcgctccaagacatcatccgtcgccacttgatgaaccacggtcatcttgagcggctgcatgaggcgatcgcagtccagcttaacgacacccatcccagcgtggcggtgccggagttgatgcgcctcctgatcgatgagcatcacctgacttgggacaatgcttggacgattacacagcgcaccttcgcctacaccaaccacacgctgctacctgaagccttggaacgctggcccgtgggcatgttccagcgcactttaccgcgcttgatggagattatctacgaaatcaactggcgcttcttggccaatgtgcgggcctggtatcccggtgacgacacgagagctcgccgcctctccctgattgaggaaggagctgagccccaggtgcgcatggctcacctcgcctgcgtgggcagtcatgccatcaacggtgtggcagccctgcatacgcaactgctcaagcaagaaaccctgcgagatttctacgagctttggcccgagaaattcttcaacatgaccaacggtgtgacgccccgccgctggctgctgcaaagtaatcctcgcctagccaacctgatcagcgatcgcattggcaatgactggattcatgatctcaggcaactgcgacggctggaagacagcgtgaacgatcgcgagtttttacagcgctgggcagaggtcaagcaccaaaataaggtcgatctgagccgctacatctaccagcagactcgcatagaagtcgatccgcactctctctttgatgtgcaagtcaaacggattcacgaatacaaacgccagctcctcgctgtcatgcatatcgtgacgctctacaactggctgaagcacaatccccagctcaacctggtgccgcgcacttttatctttgcgggcaaagcggccccgggttactaccgtgccaagcaaatcgtcaaactgatcaatgcggtcgggagcatcatcaaccatgatcccgatgtccaagggcgactgaaggtcgtcttcctacctaacttcaacgtttccttggggcagcgcatttatccagctgccgatttgtcggagcaaatctcaactgcagggaaagaagcgtccggcaccggcaacatgaagttcaccatgaatggcgcgctgacaatcggaacctacgatggtgccaacatcgagatccgcgaggaagtcggccccgaaaacttcttcctgtttggcctgcgagccgaagatatcgcccgacgccaaagtcggggctatcgacctgtggagttctggagcagcaatgcggaactgcgggcagtcctcgatcgctttagcagtggtcacttcacaccggatcagcccaacctcttccaagacttggtcagcgatctgctgcagcgggatgagtacatgttgatggcggactatcagtcctacatcgactgccagcgcgaagctgctgctgcctaccgcgattccgatcgctggtggcggatgtcgctactcaacaccgcgagatcgggcaagttctcctccgatcgcacgatcgctgactacagcgaacagatctgggaggtcaaaccagtccccgtcagcctaagcactagcttttag

SEQ ID NO: 68 - protein, 844 aa, Synechococcus elongatus PCC 7942
MSDSTAQLSYDPTTSYLEPSGLVCEDERTSVTPETLKRAYEAHLYYSQGKTSAIATLRDHYMALAYMVRDRLLQRWLASLSTYQQQHVKVVCYLSAEFLMGRHLENCLINLHLHDRVQQVLDELGLDFEQLLEKEEEPGLGNGGLGRLAACFLDSMATLDIPAVGYGIRYEFGIFHQELHNGWQIEIPDNWLRFGNPWELERREQAVEIKLGGHTEAYHDARGRYCVSWIPDRVIRAIPYDTPVPGYDTNNVSMLRLWKAEGTTELNLEAFNSGNYDDAVADKMSSETISKVLYPNDNTPQGRELRLEQQYFFVSASLQDIIRRHLMNHGHLERLHEAIAVQLNDTHPSVAVPELMRLLIDEHHLTWDNAWTITQRTFAYTNHTLLPEALERWPVGMFQRTLPRLMEIIYEINWRFLANVRAWYPGDDTRARRLSLIEEGAEPQVRMAHLACVGSHAINGVAALHTQLLKQETLRDFYELWPEKFFNMTNGVTPRRWLLQSNPRLANLISDRIGNDWIHDLRQLRRLEDSVNDREFLQRWAEVKHQNKVDLSRYIYQQTRIEVDPHSLFDVQVKRIHEYKRQLLAVMHIVTLYNWLKHNPQLNLVPRTFIFAGKAAPGYYRAKQIVKLINAVGSIINHDPDVQGRLKVVFLPNFNVSLGQRIYPAADLSEQISTAGKEASGTGNMKFTMNGALTIGTYDGANIEIREEVGPENFFLFGLRAEDIARRQSRGYRPVEFWSSNAELRAVLDRFSSGHFTPDQPNLFQDLVSDLLQRDEYMLMADYQSYIDCQREAAAAYRDSDRWWRMSLLNTARSGKFSSDRTIADYSEQIWEVKPVPVSLSTSF

SEQ ID NO: 69 - DNA, 2085 bp, Synechococcus elongatus PCC 7942
atgactgtttcatcccgtcgccctgaatcgaccgtggctgttgaccccggccaaagctatcccctcggggcaaccgtctatcccaccggcgtcaacttctcgctctacaccaagtacgcgacgggcgttgaattactgctgtttgatgaccctgagggtgcccagcctcaacggacagtgcgcctcgatccgcacctcaatcgcacctctttctactggcatgtttttattccgggcattcgctccggtcaggtttatgcttaccgcgtctttggcccctacgcacctgatcgcggcctctgttttaaccccaacaaagtgctgctggatccctacgctcgcggggttgtcggctggcagcactacagtcgcgaagcggctattaaacccagtaataactgcgttcaagccctgcgtagcgtggttgttgaccccagcgactacgactgggaaggcgatcgccatccacgcacaccctacgctcgcacagtaatctatgagctgcatgttggcggcttcaccaagcatcccaattccggcgtcgcccctgaaaaacgtggcacctacgctggtctaatcgaaaaaattccctacctgcaatccctcggcgtcacggccgttgagttgctgccggtgcaccagttcgatcgccaagatgcccccttaggacgcgagaactactggggctacagcaccatggctttttttgcgccccacgcagcctacagctctcgccatgatccacttggtccagttgatgagttccgcgacctcgtcaaggcgctccaccaagcagggattgaggtgattctcgacgtggtgttcaaccacactgctgaagggaatgaagacggtccaacgctgtctttcaaaggtctagcgaattcaacctactatctgctggatgaacaggcgggctatcgcaactacaccggctgcggcaacaccgtcaaagctaacaattcgatcgtgcgatcgctgattctcgattgcctgcgttattgggtctcggaaatgcacgtcgatggcttccgctttgaccttgcgtcggtgctgagtcgtgatgccaatggcaaccccctatcggatccgcccttgctttgggcgattgattccgatccggttttggccggtacgaagctcattgctgaagcttgggacgcagccggcttatatcaggttggtacctttattggcgatcgctttgggacttggaacggtcccttccgggacgatattcggcgtttttggcgtggagatcagggctgtacttacgccctcagtcaacgcctgctgggtagccccgatgtctacagcacagaccaatggtatgccggacgcaccattaacttcatcacctgccatgacggctttacgctgcgagatctagtcagctatagccagaagcacaactttgccaatggagagaacaatcgggacgggaccaatgacaactacagctggaactacggcattgaaggcgagaccgatgaccccacgattctgagcttacgggaacggcagcagcgcaatttgctcgccacgttattcctcgcccagggcacaccgatgctgacgatgggcgatgaggtcaaacgcagtcagcagggtaacaataacgcctactgccaagacaatgagatcagctggtttgattggtcgctgtgcgatcgccatgccgatttcttggtgttcagtcgccgcctgattgaactttcccagtcgctggtgatgttccaacagaacgaactgctgcagaacgaaccccatccgcgtcgtccctatgccatctggcatggcgtcaaactcaaacaacccgattgggcgctgtggtcccacagtctggccgtcagtctctgccatcctcgccagcaggaatggctttacctagcctttaatgcttactgggaagacctgcgcttccagttgccgaggcctcctcgcggccgcgtttggtatcgcttgctcgatacttcactgccgaatcttgaagcttgtcatctgccggatgaggcaaaaccctgcctacggcgcgattacatcgtcccagcgcgatcgctcttactgttgatggctcgtgcttaa

SEQ ID NO: 70 - protein, 694 aa, Synechococcus elongatus PCC 7942
MTVSSRRPESTVAVDPGQSYPLGATVYPTGVNFSLYTKYATGVELLLFDDPEGAQPQRTVRLDPHLNRTSFYWHVFIPGIRSGQVYAYRVFGPYAPDRGLCFNPNKVLLDPYARGVVGWQHYSREAAIKPSNNCVQALRSVVVDPSDYDWEGDRHPRTPYARTVIYELHVGGFTKHPNSGVAPEKRGTYAGLIEKIPYLQSLGVTAVELLPVHQFDRQDAPLGRENYWGYSTMAFFAPHAAYSSRHDPLGPVDEFRDLVKALHQAGIEVILDVVFNHTAEGNEDGPTLSFKGLANSTYYLLDEQAGYRNYTGCGNTVKANNSIVRSLILDCLRYWVSEMHVDGFRFDLASVLSRDANGNPLSDPPLLWAIDSDPVLAGTKLIAEAWDAAGLYQVGTFIGDRFGTWNGPFRDDIRRFWRGDQGCTYALSQRLLGSPDVYSTDQWYAGRTINFITCHDGFTLRDLVSYSQKHNFANGENNRDGTNDNYSWNYGIEGETDDPTILSLRERQQRNLLATLFLAQGTPMLTMGDEVKRSQQGNNNAYCQDNEISWFDWSLCDRHADFLVFSRRLIELSQSLVMFQQNELLQNEPHPRRPYAIWHGVKLKQPDWALWSHSLAVSLCHPRQQEWLYLAFNAYWEDLRFQLPRPPRGRVWYRLLDTSLPNLEACHLPDEAKPCLRRDYIVPARSLLLLMARA

SEQ ID NO: 71 - DNA, 1500 bp, Synechococcus elongatus PCC 7942
gtgtttacacgagccgccggcattttgttacatcccacttcgttgccggggccattcggcagcggcgaccttggtccggcctcgcggcagtttcttgactggttggcaacggcgggacaacaactgtggcaagtgttgccccttgggccgacaggctatggctattcgccttacctctgctattccgccttggctggcaatcccgctctgatcagccctgaactcttggcagaagatggctggctccaagaatcggactgggcagactgtcctgcttttccgagcgatcgcgtcgattttgccagcgtcttgccctatcgcgatcaactgctgcgccgtgcctacagccaattcctgcaaagagcggcttccagcgatcgccaactctttcaagctttctgtgaacaggaagcccattggctggatgactacgccctgttcatggcgattaagctggctagccaaggtcagccttggacagaatggccggaagcgctgcgtcagcggcaacctcaagccttggctaaagcccgcgatcgctggggcggcgaaattggcttccagcagtttctgcagtggcaatttcgcgagcagtggttggccctgcgggaagaagcccaagcccgccatatttcgctgattggcgatattccgatctacgtcgctcatgacagtgcggacgtttgggccaatcctcagttctttgccctcgatcctgaaacgggcgcagttgatcagcaggccggtgtgccgcctgactatttctccgaaaccggccaactctggggcaatcccgtctacaactgggctgcgctgcaggcggatggctatcgctggtggttgcaacggctgcaacagctcctcagcttagtggactacattcgcatcgaccacttccgcggtttagaggcgttttggtcggttcccgctggtgaagaaacggcgatcgacggagagtgggtcaaagccccaggcgctgatctgctgagcacgattcgccaaaaactgggagcgctaccgattctggcagaggatctcggtgtgattacgccggaggtggaagcgctgcgcgatcgctttgagctgccgggcatgaagattctgcagttcgcctttgactctggggccggcaatgcctatctaccgcacaactactggggtcgtcgctgggtggcttacaccggcacccacgacaatgacacgaccgtcggctggttcctgtcccgcaatgacagcgatcgccaaacggtgctggattatctgggcgcagagtcgggctgggaaattgagtggaagctgatccgcttggcttggagctcgacggcagattgggcgatcgcaccgctccaagatgtcttcgggctggatagcagcgcccgcatgaatcgaccggggcaagccaccggcaactgggactggcgcttcagtgccgactggctgacgggcgatcgtgcccaacgcctgcggcgactctcgcagctctatggacgctgtagatga

SEQ ID NO: 72 - protein, 499 aa, Synechococcus elongatus PCC 7942
MFTRAAGILLHPTSLPGPFGSGDLGPASRQFLDWLATAGQQLWQVLPLGPTGYGYSPYLCYSALAGNPALISPELLAEDGWLQESDWADCPAFPSDRVDFASVLPYRDQLLRRAYSQFLQRAASSDRQLFQAFCEQEAHWLDDYALFMAIKLASQGQPWTEWPEALRQRQPQALAKARDRWGGEIGFQQFLQWQFREQWLALREEAQARHISLIGDIPIYVAHDSADVWANPQFFALDPETGAVDQQAGVPPDYFSETGQLWGNPVYNWAALQADGYRWWLQRLQQLLSLVDYIRIDHFRGLEAFWSVPAGEETAIDGEWVKAPGADLLSTIRQKLGALPILAEDLGVITPEVEALRDRFELPGMKILQFAFDSGAGNAYLPHNYWGRRWVAYTGTHDNDTTVGWFLSRNDSDRQTVLDYLGAESGWEIEWKLIRLAWSSTADWAIAPLQDVFGLDSSARMNRPGQATGNWDWRFSADWLTGDRAQRLRRLSQLYGRCR

SEQ ID NO: 73 - protein, 543 aa, Synechococcus elongatus PCC 7942
MNIHTVATQAFSDQKPGTSGLRKQVPVFQKRHYLENFVQSIFDSLEGYQGQTLVLGGDGRYYNRTAIQTILKMAAANGWGRVLVGQGGILSTPAVSNLIRQNGAFGGIILSASHNPGGPEGDFGIKYNISNGGPAPEKVTDAIYACSLKIEAYRILEAGDVDLDRLGSQQLGEMTVEVIDSVADYSRLMQSLFDFDRIRDRLRGGLRIAIDSMHAVTGPYATTIFEKELGAAAGTVFNGKPLEDFGGGHPDPNLVYAHDLVELLFGDRAPDFGAASDGDGDRNMILGNHFFVTPSDSLAILAANASLVPAYRNGLSGIARSMPTSAAADRVAQALNLPCYETPTGWKFFGNLLDADRVTLCGEESFGTGSNHVREKDGLWAVLFWLNILAVREQSVAEIVQEHWRTYGRNYYSRHDYEGVESDRASTLVDKLRSQLPSLTGQKLGAYTVAYADDFRYEDPVDGSISEQQGIRIGFEDGSRMVFRLSGTGTAGATLRLYLERFEGDTTKQGLDPQVALADLIAIADEVAQITTLTGFDQPTVIT

SEQ ID NO: 74 - protein, 567 aa, Synechocystis sp. PCC 6803
MSKPLIAALHFLQFLYMTSRINPLAGQHPPADSLLDVAKLLDDYYRQQPDPENPAQLVSFGTSGHRGSALNGTFNEAHILAVTQAVVDYRQAQGITGPLYMGMDSHALSEPAQKTALEVLAANQVETFLTTATDLTRFTPTPAVSYAILTHNQGRKEGLADGIIITPSHNPPTDGGFKYNPPSGGPAEPEATQWIQNRANELLKNGNKTVKRLDYEQALKATTTHAHDFVTPYVAGLADIIDLDVIRSAGLRLGVDPLGGANVGYWEPIAAKYNLNISLVNPGVDPTFKFMTLDWDGKIRMDCSSPYAMASLVKIKDHYDIAFGNDTDGDRHGIVTPSVGLMNPNHFLSVAIWYLFSQRQQWSGLSAIGKTLVSSSMIDRVGAMINRQVYEVPVGFKWFVSGLLDGSFGFGGEESAGASFLKKNGTVWTTDKDGTIMDLLAAEITAKTGKDPGLHYQDLTAKLGNPIYQRIDAPATPAQKDRLKKLSPDDVTATSLAGDAITAKLTKAPGNQAAIGGLKVTTAEGWFAARPSGTENVYKIYAESFKDEAHLQAIFTEAEAIVTSALG

SEQ ID NO: 75 - DNA, 1632 bp, Synechococcus elongatus PCC 7942; identical to SEQ ID NO: 24

SEQ ID NO: 76 - protein, 543 aa, Synechococcus elongatus PCC 7942; identical to SEQ ID NO: 73

SEQ ID NO: 77 - protein, 552 aa, Synechococcus sp. WH8102
MTTSAPAEPTLRLVRLDAPFTDQKPGTSGLRKSSQQFEQANYLESFVEAVFRTLPGVQGGTLVLGGDGRYGNRRAIDVILRMGAAHGLSKVIVTTGGILSTPAASNLIRQRQAIGGIILSASHNPGGPNGDFGVKVNGANGGPTPASFTDAVFECTKTLEQYTIVDAAAIAIDTPGSYSIGAMQVEVIDGVDDFVALMQQLFDFDRIRELIRSDFPLAFDAMHAVTGPYATRLLEEILGAPAGSVRNGVPLEDFGGGHPDPNLTYAHELAELLLDGEEFRFGAACDGDGDRNMILGQHCFVNPSDSLAVLTANATVAPAYADGLAGVARSMPTSSAVDVVAKELGIDCYETPTGWKFFGNLLDAGKITLCGEESFGTGSNHVREKDGLWAVLFWLQILAERRCSVAEIMAEHWKRFGRHYYSRHDYEAVASDAAHGLFHRLEGMLPGLVGQSFAGRSVSAADNFSYTDPVDGSVTKGQGLRILLEDGSRVMVRLSGTGTKGATIRVYLESYVPSSGDLNQDPQVALADMISAINELAEIKQRTGMDRPTVIT

SEQ ID NO: 78 - DNA, 1662 bp, Synechococcus sp. RCC 307
gtgacgctttcctcacccagcactgagttctccgtgcagcagatcaagctgccagaagcgtttcaagaccagaagcctggcacctcgggactgcgcaagagcacccaacaatttgaacagcctcattacctcgaaagttttatcgaggcgatcttccgcaccctccctggtgtgcaaggcgggaccttggtggtgggcggtgatggccgctacggcaaccgccgcgccatcgatgtcatcacccggatggcggcagcccatggactggggcggattgtgctgaccaccggcggcatcctctccacccctgccgcttccaacttgatccgccaacgccaggccattggcggcatcatcctctcggccagccacaaccctggagggcccaaaggcgactttggcgtcaaggtcaatggcgccaacggcggccctgcccctgaatctcttaccgatgccatctacgcctgcagccagcagctcgatggctaccgcatcgcaagtggaaccgcactgcccctcgacgccccagccgagcatcaaatcggtgcgttgaacgtggaggtgatcgacggcgtcgacgactacctgcaactgatgcagcacttgttcgacttcgatctgatcagcgatttgctcaagggctcatggccaatggcctttgacgccatgcatgccgtcactggtccctacgccagcaaactctttgagcagctcctaggagccccaagcgggaccgtgcgcaacgggcgctgcctcgaagactttggtggcggccatcccgatcccaacctcacctacgccaaagagctggcgacgctgctgctggatggtgatgactatcgctttggcgcggcctgtgatggcgatggcgaccgcaacatgattttggggcagcgctgctttgtgaaccccagcgacagcctcgctgtcttaacggcgaacgccaccttggtgaagggctatgcctccggcctggccggcgttgctcgctcgatgcccaccagtgccgcagtggatgtggtggccaagcagctggggatcaattgctttgagacccccaccggttggaaatttttcggcaacctgctcgatgccggacgcatcaccctttgcggggaagagagctttggaacaggcagtgatcacatccgcgaaaaagatggcctctgggctgtgttgttttggctctcgatcctggccaagcgccaatgctctgttgcggaggtgatgcagcagcactggagcacctacgggcgtcattactactcgcgccatgactacgaaggtgtcgaaaccgatcgggcccatgggctctacaacggcctgcgcgatcggcttggcgagctgactggaaccagctttgccgatagccgcatcgccaatgctgacgacttcgcctacagcgaccccgtcgatggctcactgacccagaagcaaggcctacgtctgctcctggaggacggcagccgcatcatcctgcggctctcgggaaccggcaccaaaggagccacgctgcggctctatctcgagcgctatgtcgccactggcggcaacctcgatcaaaatccccagcaagccttagccggcatgattgcggccgccgatgccctcgccggcatccggtcaaccaccggcatggatgtccccacggtgatcacctga

SEQ ID NO: 79 - protein, 553 aa, Synechococcus sp. RCC 307
MTLSSPSTEFSVQQIKLPEAFQDQKPGTSGLRKSTQQFEQPHYLESFIEAIFRTLPGVQGGTLVVGGDGRYGNRRAIDVITRMAAAHGLGRIVLTTGGILSTPAASNLIRQRQAIGGIILSASHNPGGPKGDFGVKVNGANGGPAPESLTDAIYACSQQLDGYRIASGTALPLDAPAEHQIGALNVEVIDGVDDYLQLMQHLFDFDLISDLLKGSWPMAFDAMHAVTGPYASKLFEQLLGAPSGTVRNGRCLEDFGGGHPDPNLTYAKELATLLLDGDDYRFGAACDGDGDRNMILGQRCFVNPSDSLAVLTANATLVKGYASGLAGVARSMPTSAAVDVVAKQLGINCFETPTGWKFFGNLLDAGRITLCGEESFGTGSDHIREKDGLWAVLFWLSILAKRQCSVAEVMQQHWSTYGRHYYSRHDYEGVETDRAHGLYNGLRDRLGELTGTSFADSRIANADDFAYSDPVDGSLTQKQGLRLLLEDGSRIILRLSGTGTKGATLRLYLERYVATGGNLDQNPQQALAGMIAAADALAGIRSTTGMDVPTVIT

SEQ ID NO: 80 - DNA, 1467 bp, Synechococcus sp PCC 7002
gtgttggcgtttgggaatcaacagccgattcggttcggcacagacggttggcgtggcattattgcggcggattttacctttgaacgggtgcaacgggtggcgatcgccacagcccatgttttaaaagaaaatttcgcaaaccaagccattgataacacgataatcgtcggctacgaccggcggtttctcgcagatgaatttgcccttgctgccgccgaagcgatccagggggaaggatttcacgtacttctagccaatagttttgcgccaaccccagccctgagctatgccgcccaccaccacaaggctctgggggcgatcgccttaacggccagccataatccagcgggttatttaggattaaaagtgaaaggggctttcggcggctcggtttccgaagaaattacggctcagattgaagcgcgactggaagccgggattgatcctcaacattcaacgacgggccgtttagattattttgatccctggcaggactattgcgccggattacagcaactggttgatttagaaaaaattcgccaggcgatcgccgctggtcgtctccaggtctttgccgatgtaatgtatggcgcagcggcgggcggtttgacccaactgctcaatgcggcgatccaagaaatccattgtgaaccagatcctttgttcggcggccgcccaccagagcctttagaaaaacatttgtctcaactgcaacgcaccattcgcgccgcccataatcaagatttagaggcaattcaggtgggatttgtctttgatggtgatggcgatcgcattgctgctgtggctggggatggtgagtttctcagttcccaaaagctaatcccgattttgctggcccatttgtcccaaaatcgccaatatcaaggggaagtggtaaaaactgtcagcggctctgatttaatcccccgtttgagcgaatactacggtttgccagtctttgaaacacccatcggctacaaatacattgccgaacgaatgcaacagacccaggtgcttcttggtggcgaagaatccggcggcattggctacggccaccacattcccgaacgggatgcgctgctggcggcattgtatctcctagaggcgatcgccatttttgatcaagacctcggcgagatttaccagagtcttcaaagcaaagctaatttttatggcgcctacgaccgcattgatttacatttgcgggatttctccagccgcgatcgcctattaaaaatcctcgcgacaaatccccccaaggcgatctccaaccatgacgtaattcacagcgaccccaaagatggctataaattccgccttgctgatcaaagttggttgctgattcgcttcagtggtaccgagcctgtactgcggttatatagtgaagcggtcaatcctaaagccgtacaagaaatcctcgcctgggcgcaaacctgggctgaggctgccgaccaagccgaaggttag

SEQ ID NO: 81 - protein, 488 aa, Synechococcus sp PCC 7002
MLAFGNQQPIRFGTDGWRGIIAADFTFERVQRVAIATAHVLKENFANQAIDNTIIVGYDRRFLADEFALAAAEAIQGEGFHVLLANSFAPTPALSYAAHHHKALGAIALTASHNPAGYLGLKVKGAFGGSVSEEITAQIEARLEAGIDPQHSTTGRLDYFDPWQDYCAGLQQLVDLEKIRQAIAAGRLQVFADVMYGAAAGGLTQLLNAAIQEIHCEPDPLFGGRPPEPLEKHLSQLQRTIRAAHNQDLEAIQVGFVFDGDGDRIAAVAGDGEFLSSQKLIPILLAHLSQNRQYQGEVVKTVSGSDLIPRLSEYYGLPVFETPIGYKYIAERMQQTQVLLGGEESGGIGYGHHIPERDALLAALYLLEAIAIFDQDLGEIYQSLQSKANFYGAYDRIDLHLRDFSSRDRLLKILATNPPKAISNHDVIHSDPKDGYKFRLADQSWLLIRFSGTEPVLRLYSEAVNPKAVQEILAWAQTWAEAADQAEG

SEQ ID NO: 82 - DNA, 1038 bp, Synechococcus elongatus PCC 7942
atgaccttgctattggccggggatatcggcggaaccaaaacgaatttaatgttggcgatcgcctctgattgcgatcgtttagaaccgctccatcaggccagttttgccagtgcggcctaccctgatttagtgccgatggtgcaggagtttttggctgccgcaccctccgccgaggtgcgatcgccagttgtggcttgttttggcattgccggccccgttgtccatggaaccgcgaagctgacgaacctgccttggcagctctctgaagcgcggctggcgaaggaattgggcattgcgcaggtggcgttgatcaatgattttgctgcgatcgcctacggcctacccggcttgaccgccgaagatcaagtcgttgtgcaagtcggtgaagccgatccggcggctccgatcgccattctgggggcaggaactggcttgggcgaaggcttcatcattcccacagcccaaggccgccaagtgtttggcagcgaaggttctcacgctgactttgcgccgcaaaccgaactggagtccgagttactgcattttctacgcaatttttacgcaatcgagcatatctcggtcgagcgagtggtctccggccaagggattgcagccatctacgccttcctgcgcgatcgccatcccgaccaagaaaatccagcccttggggcgattgcctcggcttggcaaacgggcggcgaccaagcccctgatctggcagcagccgtatcccaagcagccttgagcgatcgcgatccgctggccctacaagccatgcagatatttgtcagtgcttacggggcggaagccggcaacctcgcgttgaaattgctctcctacggcggggtctacgtcgccggcgggattgcgggcaaaatcctgccgctcttgactgatggcacttttctgcaagccttccaagccaagggacgggtgaaggggctgctgacgcggatgcctatcacgatcgtcacgaaccacgaagtcgggctgatcggggctggactgcgggcggctgcgatcgctactcaaccatga

SEQ ID NO: 83 - protein, 345 aa, Synechococcus elongatus PCC 7942
MTLLLAGDIGGTKTNLMLAIASDCDRLEPLHQASFASAAYPDLVPMVQEFLAAAPSAEVRSPVVACFGIAGPVVHGTAKLTNLPWQLSEARLAKELGIAQVALINDFAAIAYGLPGLTAEDQVVVQVGEADPAAPIAILGAGTGLGEGFIIPTAQGRQVFGSEGSHADFAPQTELESELLHFLRNFYAIEHISVERVVSGQGIAAIYAFLRDRHPDQENPALGAIASAWQTGGDQAPDLAAAVSQAALSDRDPLALQAMQIFVSAYGAEAGNLALKLLSYGGVYVAGGIAGKILPLLTDGTFLQAFQAKGRVKGLLTRMPITIVTNHEVGLIGAGLRAAAIATQP

SEQ ID NO: 84 - DNA, 1587 bp, Synechococcus elongatus PCC 7942
atgaccgcccagcagctctggcaacgctacctcgattggctctactacgatccctcgctggagttttacctcgacatcagccgcatgggattcgatgacgctttcgttactagcatgcagcccaagttccagcacgcctttgcggcgatggcagagctcgaggccggagcgatcgccaaccccgatgaacagcggatggtcggccactactggctgcgcgatcctgagctggcacccacaccggagctgcagacccaaattcgcgacacgctggccgcgatccaagacttcgccctcaaagtacacagtggcgtgttgcggccacccaccggctcccgcttcaccgacattctctcaattggcattggcgggtcggccctagggccgcagtttgtctcagaagccctccggcctcaagcggcactgctccagattcacttctttgacaacaccgatccagctggcttcgatcgcgttttagctgatctcggcgatcgccttgcttccaccttagtaatcgttatttccaaatctggcggcactcccgaaacccgcaacggcatgctggaggttcagtccgcctttgcccagcgagggattgcctttgcgccccaagctgtcgccgtcacaggggtggggagccatctcgatcatgtagcgatcacagaaagatggctggcccgtttccccatggaagactgggtgggcggccgcacctctgaactatctgcagtcggtctactctcggcagccctactgggcatcgacatcaccgccatgctggccggggcgcggcaaatggacgccctgacccgccattccgatttgcgacaaaatccggcagcgctcttggctttgagctggtactgggccggcaatgggcaaggcaaaaaagacatggtcatcctgccctacaaggacagcctgctgctgtttagccgctatctgcagcagttgatcatggagtcactgggcaaggagcgcgatctgctcggcaaggtagttcaccaaggcatcgccgtttacggcaacaaaggctcgaccgatcaacatgcctacgtccagcaactgcgcgagggcattcctaacttctttgccacgtttatcgaggtgctcgaagaccgacaggggccgtcgccagtcgtggagcctggcatcaccagtggcgactatctcagcgggctgcttcaaggcacccgcgcggcgctttacgaaaatgggcgtgagtcgatcacgattacggtgccgcgcgttgatgcacaacaggtgggggccttgatcgcgctgtatgaacgggcggtgggactctatgccagcttggttggcatcaatgcctatcaccagccgggggtggaagccggcaaaaaggctgctgccggtgttctcgagatccagcgccagattgtggagttgctccaacagggacaaccactctcgatcgcagcgatcgcagacgatttaggtcagagtgagcagattgaaacgatctacaaaatcctgcgccatctcgaagccaatcaacgcggcgttcagttaaccggcgatcgccataatcccctcagtctgattgcgagttggcaacgataa

SEQ ID NO: 85 - protein, 528 aa, Synechococcus elongatus PCC 7942
MTAQQLWQRYLDWLYYDPSLEFYLDISRMGFDDAFVTSMQPKFQHAFAAMAELEAGAIANPDEQRMVGHYWLRDPELAPTPELQTQIRDTLAAIQDFALKVHSGVLRPPTGSRFTDILSIGIGGSALGPQFVSEALRPQAALLQIHFFDNTDPAGFDRVLADLGDRLASTLVIVISKSGGTPETRNGMLEVQSAFAQRGIAFAPQAVAVTGVGSHLDHVAITERWLARFPMEDWVGGRTSELSAVGLLSAALLGIDITAMLAGARQMDALTRHSDLRQNPAALLALSWYWAGNGQGKKDMVILPYKDSLLLFSRYLQQLIMESLGKERDLLGKVVHQGIAVYGNKGSTDQHAYVQQLREGIPNFFATFIEVLEDRQGPSPVVEPGITSGDYLSGLLQGTRAALYENGRESITITVPRVDAQQVGALIALYERAVGLYASLVGINAYHQPGVEAGKKAAAGVLEIQRQIVELLQQGQPLSIAAIADDLGQSEQIETIYKILRHLEANQRGVQLTGDRHNPLSLIASWQR

SEQ ID NO: 86 - protein, 439 aa, Synechocystis sp. PCC 6803
MCCWQSRGLLVKRVLAIILGGGAGTRLYPLTKLRAKPAVPLAGKYRLIDIPVSNCINSEIVKIYVLTQFNSASLNRHISRAYNFSGFQEGFVEVLAAQQTKDNPDWFQGTADAVRQYLWLFREWDVDEYLILSGDHLYRMDYAQFVKRHRETNADITLSVVPVDDRKAPELGLMKIDAQGRITDFSEKPQGEALRAMQVDTSVLGLSAEKAKLNPYIASMGIYVFKKEVLHNLLEKYEGATDFGKEIIPDSASDHNLQAYLFDDYWEDIGTIEAFYEANLALTKQPSPDFSFYNEKAPIYTRGRYLPPTKMLNSTVTESMIGEGCMIKQCRIHHSVLGIRSRIESDCTIEDTLVMGNDFYESSSERDTLKARGEIAAGIGSGTTIRRAIIDKNARIGKNVMIVNKENVQEANREELGFYIRNGIVVVIKNVTIADGTVI

SEQ ID NO: 87 - protein, 429 aa, Nostoc sp. PCC 7120
MKKVLAIILGGGAGTRLYPLTKLRAKPAVPVAGKYRLIDIPVSNCINSEIFKIYVLTQFNSASLNRHIARTYNFSGFSEGFVEVLAAQQTPENPNWFQGTADAVRQYLWMLQEWDVDEFLILSGDHLYRMDYRLFIQRHRETNADITLSVIPIDDRRASDFGLMKIDNSGRVIDFSEKPKGEALTKMRVDTTVLGLTPEQAASQPYIASMGIYVFKKDVLIKLLKEALERTDFGKEIIPDAAKDHNVQAYLFDDYWEDIGTIEAFYNANLALTQQPMPPFSFYDEEAPIYTRARYLPPTKLLDCHVTESIIGEGCILKNCRIQHSVLGVRSRIETGCMIEESLLMGADFYQASVERQCSIDKGDIPVGIGPDTIIRRAIIDKNARIGHDVKIINKDNVQEADRESQGFYIRSGIVVVLKNAVITDGTII

SEQ ID NO: 88 - protein, 429 aa, Anabaena variabilis
MKKVLAIILGGGAGTRLYPLTKLRAKPAVPVAGKYRLIDIPVSNCINSEIFKIYVLTQFNSASLNRHIARTYNFSGFSEGFVEVLAAQQTPENPNWFQGTADAVRQYLWMLQEWDVDEFLILSGDHLYRMDYRLFIQRHRETNADITLSVIPIDDRRASDFGLMKIDNSGRVIDFSEKPKGEALTKMRVDTTVLGLTPEQAASQPYIASMGIYVFKKDVLIKLLKESLERTDFGKEIIPDASKDHNVQAYLFDDYWEDIGTIEAFYNANLALTQQPMPPFSFYDEEAPIYTRARYLPPTKLLDCHVTESIIGEGCILKNCRIQHSVLGVRSRIETGCVIEESLLMGADFYQASVERQCSIDKGDIPVGIGPDTIIRRAIIDKNARIGHDVKIINKDNVQEADRESQGFYIRSGIVVVLKNAVITDGTII

SEQ ID NO: 89 - protein, 428 aa, Trichodesmium erythraeum IMS 101
MKNVLSIILGGGAGTRLYPLTKLRAKPAVPLAGKYRLIDIPISNCINSEIQKIYVLTQFNSASLNRHITRTYNFSGFSDGFVEVLAAQQTKDNPEWFQGTADAVRKYIWLFKEWDIDYYLILSGDHLYRMDYRDFVQRHIDTKADITLSVLPIDEARASEFGVMKIDNSGRIVEFSEKPKGNALKAMAVDTSILGVSPEIATKQPYIASMGIYVFNKDAMIKLIEDSEDTDFGKEILPKSAQSYNLQAYPFQGYWEDIGTIKSFYEANLALTQQPQPPFSFYDEQAPIYTRSRYLPPSKLLDCEITESIVGEGCILKKCRIDHCVLGVRSRIEANCIIQDSLLMGSDFYESPTERRYGLKKGSVPLGIGAETKIRGAIIDKNARIGCNVQIINKDNVEEAQREEEGFIIRSGIVVVLKNATIPDGTVI

SEQ ID NO: 90 - protein, 430 aa, Synechococcus elongatus PCC 7942
MKNVLAIILGGGAGSRLYPLTKQRAKPAVPLAGKYRLIDIPVSNCINADINKIYVLTQFNSASLNRHLSQTYNLSSGFGNGFVEVLAAQITPENPNWFQGTADAVRQYLWLIKEWDVDEYLILSGDHLYRMDYSQFIQRHRDTNADITLSVLPIDEKRASDFGLMKLDGSGRVVEFSEKPKGDELRAMQVDTTILGLDPVAAAAQPFIASMGIYVFKRDVLIDLLSHHPEQTDFGKEVIPAAATRYNTQAFLFNDYWEDIGTIASFYEANLALTQQPSPPFSFYDEQAPIYTRARYLPPTKLLDCQVTQSIIGEGCILKQCTVQNSVLGIRSRIEADCVIQDALLMGADFYETSELRHQNRANGKVPMGIGSGSTIRRAIVDKNAHIGQNVQIVNKDHVEEADREDLGFMIRSGIVVVVKGAVIPDNTVI

SEQ ID NO: 91 - protein, 431 aa, Synechococcus sp. WH8102
MKRVLAIILGGGAGTRLYPLTKMRAKPAVPLAGKYRLIDIPISNCINSNINKMYVMTQFNSASLNRHLSQTFNLSASFGQGFVEVLAAQQTPDSPSWFEGTADAVRKYQWLFQEWDVDEYLILSGDQLYRMDYSLFVEHHRSTGADLTVAALPVDPKQAEAFGLMRTDGDGDIKEFREKPKGDSLLEMAVDTSRFGLSANSAKERPYLASMGIYVFSRDTLFDLLDSNPGYKDFGKEVIPEALKRGDKLKSYVFDDYWEDIGTIGAFYEANLALTQQPTPPFSFYDEKFPIYTRPRYLPPSKLVDAQITNSIVGEGSILKSCSIHHCVLGVRSRIETDVVLQDTLVMGADFFESSDERAVLRERGGIPVGVGQGTTVKRAILDKNARIGSNVTIVNKDHVEEADRSDQGFYIRNGIVVVVKNATIQDGTVI

SEQ ID NO: 92 - protein, 431 aa, Synechococcus sp. RCC 307
MKRVLAIILGGGAGTRLYPLTKMRAKPAVPLAGKYRLIDIPVSNCINSGINKIYVLTQFNSASLNRHIAQTFNLSSGFDQGFVEVLAAQQTPDSPSWFEGTADAVRKYEWLLQEWDIDEVLILSGDQLYRMDYAHFVAQHRASGADLTVAALPVDREQAQSFGLMHTGAEASITKFREKPKGEALDEMSCDTASMGLSAEEAHRRPFLASMGIYVFKRDVLFRLLAENPGATDFGKEIIPKALDDGFKLRSYLFDDYWEDIGTIRAFYEANLALTTQPRPPFSFYDKRFPIYTRHRYLPPSKLQDAQVTDSIVGEGSILKACSIHHCVLGVRSRIEDEVALQDTLVMGNDFYESGEERAILRERGGIPMGVGRGTTVKKAILDKNVRIGSNVSIINKDNVEEADRAEQGFYIRGGIVVITKNASIPDGMVI

SEQ ID NO: 93 - protein, 429 aa, Synechococcus sp. PCC 7002
MKRVLGIILGGGAGTRLYPLTKLRAKPAVPLAGKYRLIDIPVSNCINSEIHKIYILTQFNSASLNRHISRTYNFTGFTEGFTEVLAAQQTKENPDWFQGTADAVRQYSWLLEDWDVDEYIILSGDHLYRMDYREFIQRHRDTGADITLSVVPVGEKVAPAFGLMKIDANGRVVDFSEKPTGEALKAMQVDTQSLGLDPEQAKEKPYIASMGIYVFKKQVLLDLLKEGKDKTDFGKEIIPDAAKDYNVQAYLFDDYWADIGTIEAFYEANLGLTKQPIPPFSFYDEKAPIYTRARYLPPTKVLNADVTESMISEGCIIKNCRIHHSVLGIRTRVEADCTIEDTMIMGADYYQPYEKRQDCLRRGKPPIGIGEGTTIRRAIIDKNARIGKNVMIVNKENVEESNREELGYYIRSGITVVLKNAVIPDGTVI

SEQ ID NO: 94 - protein, 477 aa, Synechocystis sp. PCC 6803
MKILFVAAEVSPLAKVGGMGDVVGSLPKVLHQLGHDVRVFMPYYGFIGDKIDVPKEPVWKGEAMFQQFAVYQSYLPDTKIPLYLFGHPAFDSRRIYGGDDEAWRFTFFSNGAAEFAWNHWKPEIIHCHDWHTGMIPVWMHQSPDIATVFTIHNLAYQGPWRGLLETMTWCPWYMQGDNVMAAAIQFANRVTTVSPTYAQQIQTPAYGEKLEGLLSYLSGNLVGILNGIDTEIYNPAEDRFISNVFDADSLDKRVKNKIAIQEETGLEINRNAMVVGIVARLVEQKGIDLVIQILDRFMSYTDSQLIILGTGDRHYETQLWQMASRFPGRMAVQLLHNDALSRRVYAGADVFLMPSRFEPCGLSQLMAMRYGCIPIVRRTGGLVDTVSFYDPINEAGTGYCFDRYEPLDCFTAMVRAWEGFRFKADWQKLQQRAMRADFSWYRSAGEYIKVYKGVVGKPEELSPMEEEKIAELTASYR

SEQ ID NO: 95 - protein, 472 aa, Nostoc sp. PCC 7120
MRILFVAAEAAPIAKVGGMGDVVGALPKVLRKMGHDVRIFLPYYGFLPDKMEIPKDPIWKGYAMFQDFTVHEAVLPGTDVPLYLFGHPAFTPRRIYSGDDEDWRFTLFSNGAAEFCWNYWKPDIIHCHDWHTGMIPVWMNQSPDITTVFTIHNLAYQGPWRWYLDKITWCPWYMQGHNTMAAAVQFADRVNTVSPTYAEQIKTPAYGEKIEGLLSFISGKLSGIVNGIDTEVYDPANDKYIAQTFTADTLDKRKANKIALQEEVGLEVNSNAFLIGMVTRLVEQKGLDLVIQMLDRFMAYTDAQFVLLGTGDRYYETQMWQLASRYPGRMATYLLYNDALSRRIYAGTDAFLMPSRFEPCGISQMMALRYGSIPIVRRTGGLVDTVSHHDPINEAGTGYCFDRYEPLDLFTCMIRAWEGFRYKPQWQELQKRGMSQDFSWYKSAKEYDKLYRSMYGLPDPEETQPELILTNQ

SEQ ID NO: 96 - protein, 472 aa, Anabaena variabilis
MRILFVAAEAAPIAKVGGMGDVVGALPKVLRKMGHDVRIFLPYYGFLPDKMEIPKDPIWKGYAMFQDFTVHEAVLPGTDVPLYLFGHPAFNPRRIYSGDDEDWRFTLFSNGAAEFCWNYWKPEIIHCHDWHTGMIPVWMNQSPDITTVFTIHNLAYQGPWRWYLDKITWCPWYMQGHNTMAAAVQFADRVNTVSPTYAEQIKTPAYGEKIEGLLSFISGKLSGIVNGIDTEVYDPANDKFIAQTFTADTLDKRKANKIALQEEVGLEVNSNAFLIGMVTRLVEQKGLDLVIQMLDRFMAYTDAQFVLLGTGDRYYETQMWQLASRYPGRMATYLLYNDALSRRIYAGSDAFLMPSRFEPCGISQMMALRYGSIPIVRRTGGLVDTVSHHDPVNEAGTGYCFDRYEPLDLFTCMIRAWEGFRYKPQWQELQKRGMSQDFSWYKSAKEYDRLYRSIYGLPEAEETQPELILANQ

SEQ ID NO: 97 - protein, 460 aa, Trichodesmium erythraeum IMS 101
MRILFVSAEATPLAKVGGMADVVGALPKVLRKMGHDVRIFMPYYGFLGDKMEVPEEPIWEGTAMYQNFKIYETVLPKSDVPLYLFGHPAFWPRHIYYGDDEDWRFTLFANGAAEFCWNGWKPEIVHCNDWHTGMIPVWMHETPDIKTVFTIHNLAYQGPWRWYLERITWCPWYMEGHNTMAAAVQFADRVTTVSPTYASQIQTPAYGENLDGLMSFITGKLHGILNGIDMNFYNPANDRYIPQTYDVNTLEKRVDNKIALQEEVGFEVNKNSFLMGMVSRLVEQKGLDLMLQVLDRFMAYTDTQFILLGTGDRFYETQMWQIASRYPGRMSVQLLHNDALSRRIYAGTDAFLMPSRFEPCGISQLLAMRYGSIPIVRRTGGLVDTVSFYDPINNVGTGYSFDRYEPLDLLTAMVRAYEGFRFKDQWQELQKRGMRENFSWDKSAQGYIKMYKSMLGLPEE

SEQ ID NO: 98 - protein, 465 aa, Synechococcus elongatus PCC 7942
MRILFVAAECAPFAKVGGMGDVVGSLPKVLKALGHDVRIFMPYYGFLNSKLDIPAEPIWWGYAMFNHFAVYETQLPGSDVPLYLMGHPAFDPHRIYSGEDEDWRFTFFANGAAEFSWNYWKPQVIHCHDWHTGMIPVWMHQSPDISTVFTIHNLAYQGPWRWKLEKITWCPWYMQGDSTMAAALLYADRVNTVSPTYAQQIQTPTYGEKLEGLLSFISGKLSGILNGIDVDSYNPATDTRIVANYDRDTLDKRLNNKLALQKEMGLEVNPDRFLIGFVARLVEQKGIDLLLQILDRFLSYSDAQFVVLGTGERYYETQLWELATRYPGRMSTYLMYDEGLSRRIYAGSDAFLVPSRFEPCGITQMLALRYGSVPIVRRTGGLVDTVFHHDPRHAEGNGYCFDRYEPLDLYTCLVRAWESYQYQPQWQKLQQRGMAVDLSWKQSAIAYEQLYAEAIGLPIDVLQEA

SEQ ID NO: 99 - protein, 513 aa, Synechococcus sp. WH8102
MRILFAAAECAPMIKVGGMGDVVGSLPPALAKLGHDVRLIMPGYSKLWTKLTISDEPIWRAQTMGTEFAVYETKHPGNGMTIYLVGHPVFDPERIYGGEDEDWRFTFFASAAAEFAWNVWKPNVLHCHDWHTGMIPVWMHQDPEISTVFTIHNLKYQGPWRWKLDRITWCPWYMQGDHTMAAALLYADRVNAVSPTYAEEIRTAEYGEKLDGLLNFVSGKLRGILNGIDLEAWNPQTDGALPATFSADDLSGKAVCKRVLQERMGLEVRDDAFVLGMVSRLVDQKGVDLLLQVADRLLAYTDTQIVVLGTGDRGLESGLWQLASRHAGRCAVFLTYDDDLSRLIYAGSDAFLMPSRFEPCGISQLYAMRYGSVPVVRKVGGLVDTVPPHSPADASGTGFCFDRFEPVDFYTALVRAWEAYRHRDSWQELQKRGMQQDYSWDRSAIDYDVMYRDVCGLKEPTPDAAMVEQFSQGQAADPSRPEDDAINAAPEAVTAPSGPSRNPLNRLFGRRAD

SEQ ID NO: 100 - protein, 507 aa, Synechococcus sp RCC 307
MRILFAAAECAPMVKVGGMGDVVGSLPPALAELGHDVRVIMPGYGKLWSQLDVPSEPIWRAQTMGTDFAVYETRHPKTGLTIYLVGHPVFDGERIYGGEDEDWRFTFFASATSEFAWNAWKPQVLHCHDWHTGMIPVWMHQDPEISTVFTIHNLKYQGPWRWKLERMTWCPWYMQGDHTMAAALLYADRVNAVSPTYAQEIRTPEYGEQLEGLLNYISGKLRGILNGIDVEAWNPATDSRIPATYSTADLSGKAVCKRALQERMGLQVNPDTFVIGLVSRLVDQKGVDLLLQVAERFLAYTDTQIVVLGTGDRHLESGLWQMASQHSGRFASFLTYDDDLSRLIYAGSDAFLMPSRFEPCGISQLLSMRYGTIPVVRRVGGLVDTVPPYVPATQEGNGFCFDRYEAIDLYTALVRAWEAYRHQDSWQQLMKRVMQVDFSWARSALEYDRMYRDVCGMKEPTPEADAVAAFSIPQPPEQQAARAAAEAADPNPQRRFNPLGLLRRNGG

SEQ ID NO: 101 - protein, 478 aa, Synechococcus sp. PCC 7002
MRILFVSAEAAPIAKAGGMGDVVGSLPKVLRQLGHDARIFLPYYGFLNDKLDIPAEPVWWGSAMFNTFAVYETVLPNTDVPLYLFGHPAFDGRHIYGGQDEFWRFTFFANGAAEFMWNHWKPQIAHCHDWHTGMIPVWMHQSPDISTVFTIHNLAYQGPWRGFLERNTWCPWYMDGDNVMASALMFADQVNTVSPTYAQQIQTKVYGEKLEGLLSWISGKSRGIVNGIDVELYNPSNDQALVKQFSTTNLEDRAANKVIIQEETGLEVNSKAFLMAMVTRLVEQKGIDLLLNILEQFMAYTDAQLIILGTGDRHYETQLWQTAYRFKGRMSVQLLYNDALSRRIYAGSDVFLMPSRFEPCGISQMMAMRYGSVPIVRRTGGLVDTVSFHDPIHQTGTGFSFDRYEPLDMYTCMVRAWESFRYKKDWAELQRRGMSHDFSWYKSAGEYLKMYRQSIKEAPELTTDEAEKITYLVKKHAI

SEQ ID NO: 102 - DNA, 1380 bp, Synechococcus elongatus PCC 7942
atgactgctgtcgttctccctgctgccgctgaaacgctggctgctttacaagcaacctttgatcggggggatacacgcacgctcgccttccgactggcgcgattacaggatctggccaagctagttgctgacaatgaagcggagctattgcaagccttggcgtcagacctccgcaaaccagcactggaagcctacgccagtgagatttatttcgtgcgcgaccaaatcaaactgacctgcaagcatctgcggcgctggatgcaacccgagaagcagtcgatttccttgatgcagcagcctggccaggcctatcgccaagcagaaccgctcggagtcgtgctgatcattggcccctggaactatccctttcagctgctcatcacgccgttgattggggcgatcgcggcgggaaattgtgccgtactcaaaccatcggaactggctcccgcgacttccagcctgattcagcgactgatcagcgatcgctttgaccctgattacatccgcgttttagaaggcgatgctagcgttagccaagccctgattactcagcccttcgatcacatcttcttcactggcggcacggcgatcgggcgaaaagtgatggctgctgcggccgaaaacctgacgcccgtcaccctcgagttgggcggtaagtcaccctgcattgttgataccgatatcgacctcgatgtggccgcccgtcgcatcgcctggggcaaattcttcaacgccggtcaaacctgcattgcgcctgactatttgttggtgcaacgcacggtcgcagagccgttcattgaagcgctgatcgacaacatccagcagttctatggcgaggatccgcaacagagtgctgactacgcccgcattgtcagcgatcgccactggcaaaggctaaatagcctgttggttgatggcacgattcgccatggtggtcaggtggataggagcgatcgctacatcgcaccgactttaattacggacgtcaactggcgcgatcccatcctgcaagaggagatttttgggcccctcttgccgattttgatttacgaccaattggatgaggcgatcgcccaaattcgtgcccagcccaagcccctcgcgctctatctattcagccgcgatcgccaagtgcaagagcgcgtcctagcggaaaccagcgccggtagcgtctgcctcaacgacacgatcctgcaggtcggcgtccccgatgctgcttttggtggggtcggccccagcggcatgggcggctatcacggcaaagccagtttcgaaaccttcagtcactacaagctggtgctcaagcgaccgttttggctcgatctggccctgcgctatccgccctacggcgacaagatcaacctcttccgcaagctctag

SEQ ID NO: 103 - protein, 459 aa, Synechococcus elongatus PCC 7942
MTAVVLPAAAETLAALQATFDRGDTRTLAFRLARLQDLAKLVADNEAELLQALASDLRKPALEAYASEIYFVRDQIKLTCKHLRRWMQPEKQSISLMQQPGQAYRQAEPLGVVLIIGPWNYPFQLLITPLIGAIAAGNCAVLKPSELAPATSSLIQRLISDRFDPDYIRVLEGDASVSQALITQPFDHIFFTGGTAIGRKVMAAAAENLTPVTLELGGKSPCIVDTDIDLDVAARRIAWGKFFNAGQTCIAPDYLLVQRTVAEPFIEALIDNIQQFYGEDPQQSADYARIVSDRHWQRLNSLLVDGTIRHGGQVDRSDRYIAPTLITDVNWRDPILQEEIFGPLLPILIYDQLDEAIAQIRAQPKPLALYLFSRDRQVQERVLAETSAGSVCLNDTILQVGVPDAAFGGVGPSGMGGYHGKASFETFSHYKLVLKRPFWLDLALRYPPYGDKINLFRKL

SEQ ID NO: 104 - DNA, 1011 bp, Synechycystis sp. PCC6083
atgattaaagcctacgctgccctggaagccaacggaaaactccaaccctttgaatacgaccccggtgccctgggtgctaatgaggtggagattgaggtgcagtattgtggggtgtgccacagtgatttgtccatgattaataacgaatggggcatttccaattaccccctagtgccgggtcatgaggtggtgggtactgtggccgccatgggcgaaggggtgaaccatgttgaggtgggggatttagtggggctgggttggcattcgggctactgcatgacctgccatagttgtttatctggctaccacaacctttgtgccacggcggaatcgaccattgtgggccactacggtggctttggcgatcgggttcgggccaagggagtcagcgtggtgaaattacctaaaggcattgacctagccagtgccgggccccttttctgtggaggaattaccgttttcagtcctatggtggaactgagtttaaagcccactgcaaaagtggcagtgatcggcattgggggcttgggccatttagcggtgcaatttctccgggcctggggctgtgaagtgactgcctttacctccagtgccaggaagcaaacggaagtgttggaattgggcgctcaccacatactagattccaccaatccagaggcgatcgccagtgcggaaggcaaatttgactatattatctccactgtgaacctgaagcttgactggaacttatacatcagcaccctggcgccccagggacatttccactttgttggggtggtgttggagcctttggatctaaatctttttccccttttgatgggacaacgctccgtttctgcctccccagtgggtagtcccgccaccattgccaccatgttggactttgctgtgcgccatgacattaaacccgtggtggaacaatttagctttgatcagatcaacgaggcgatcgcccatctagaaagcggcaaagcccattatcgggtagtgctcagccatagtaaaaattag

SEQ ID NO: 105 - protein, 336 aa, Synechycystis sp. PCC6083
MIKAYAALEANGKLQPFEYDPGALGANEVEIEVQYCGVCHSDLSMINNEWGISNYPLVPGHEVVGTVAAMGEGVNHVEVGDLVGLGWHSGYCMTCHSCLSGYHNLCATAESTIVGHYGGFGDRVRAKGVSVVKLPKGIDLASAGPLFCGGITVFSPMVELSLKPTAKVAVIGIGGLGHLAVQFLRAWGCEVTAFTSSARKQTEVLELGAHHILDSTNPEAIASAEGKFDYIISTVNLKLDWNLYISTLAPQGHFHFVGVVLEPLDLNLFPLLMGQRSVSASPVGSPATIATMLDFAVRHDIKPVVEQFSFDQINEAIAHLESGKAHYRVVLSHSKN

SEQ ID NO: 106 - DNA, 1023 bp, Acinetobacter baylyi
atgacaactaatgtgattcatgcttatgctgcaatgcaggcaggtgaagcactcgtgccttattcgtttgatgcaggcgaactgcaaccacatcaggttgaagttaaagtcgaatattgtgggctgtgccattccgatgtctcggtactcaacaacgaatggcattcttcggtttatccagtcgtggcaggtcatgaagtgattggtacgattacccaactgggaagtgaagccaaaggactaaaaattggtcaacgtgttggtattggctggacggcagaaagctgtcaggcctgtgaccaatgcatcagtggtcagcaggtattgtgcacgggcgaaaataccgcaactattattggtcatgctggtggctttgcagataaggttcgtgcaggctggcaatgggtcattcccctgcccgacgaactcgatccgaccagtgctggtcctttgctgtgtggcggaatcacagtatttgatccaattttaaaacatcagattcaggctattcatcatgttgctgtgattggtatcggtggtttgggacatatggccatcaagctacttaaagcatggggctgtgaaattactgcgtttagttcaaatccaaacaaaaccgatgagctcaaagccatgggggccgatcacgtggtcaatagccgtgatgatgccgaaattaaatcgcaacagggtaaatttgatttactgctgagtacagttaatgtgcctttaaactggaatgcgtatctaaacacactggcacccaatggcactttccattttttgggcgtggtgatggaaccaatccctgtacctgtcggtgcgctgctaggaggtgccaaatcgctaacagcatcaccaactggctcgcctgctgccttacgtaagctgctcgaatttgcggcacgtaagaatatcgcacctcaaatcgagatgtatcctatgtcggagctgaatgaggccatcgaacgcttacattcgggtcaagcacgttatcggattgtacttaaagccgatttttaa

SEQ ID NO: 107 - protein, 340 aa, Acinetobacter baylyi
MTTNVIHAYAAMQAGEALVPYSFDAGELQPHQVEVKVEYCGLCHSDVSVLNNEWHSSVYPVVAGHEVIGTITQLGSEAKGLKIGQRVGIGWTAESCQACDQCISGQQVLCTGENTATIIGHAGGFADKVRAGWQWVIPLPDELDPTSAGPLLCGGITVFDPILKHQIQAIHHVAVIGIGGLGHMAIKLLKAWGCEITAFSSNPNKTDELKAMGADHVVNSRDDAEIKSQQGKFDLLLSTVNVPLNWNAYLNTLAPNGTFHFLGVVMEPIPVPVGALLGGAKSLTASPTGSPAALRKLLEFAARKNIAPQIEMYPMSELNEAIERLHSGQARYRIVLKADF

SEQ ID NO: 108 - protein, 415 aa, Cuphea hookeriana
MVAAAASSAFFPVPAPGASPKPGKFGNWPSSLSPSFKPKSIPNGGFQVKANDSAHPKANGSAVSLKSGSLNTQEDTSSSPPPRTFLHQLPDWSRLLTAITTVFVKSKRPDMHDRKSKRPDMLVDSFGLESTVQDGLVFRQSFSIRSYEIGTDRTASIETLMNHLQETSLNHCKSTGILLDGFGRTLEMCKRDLIWVVIKMQIKVNRYPAWGDTVEINTRFSRLGKIGMGRDWLISDCNTGEILVRATSAYAMMNQKTRRLSKLPYEVHQEIVPLFVDSPVIEDSDLKVHKFKVKTGDSIQKGLTPGWNDLDVNQHVSNVKYIGWILESMPTEVLETQELCSLALEYRRECGRDSVLESVTAMDPSKVGVRSQYQHLLRLEDGTAIVNGATEWRPKNAGANGAISTGKTSNGNSVS

SEQ ID NO: 109 - protein, 328 aa, Cuphea hookeriana [sequence omitted]

SEQ ID NO: 110 - protein, 382 aa, Umbellularia californica
MATTSLASAFCSMKAVMLARDGRGMKPRSSDLQLRAGNAPTSLKMINGTKFSYTESLKRLPDWSMLFAVITTIFSAAEKQWTNLEWKPKPKLPQLLDDHFGLHGLVFRRTFAIRSYEVGPDRSTSILAVMNHMQEATLNHAKSVGILGDGFGTTLEMSKRDLMWVVRRTHVAVERYPTWGDTVEVECWIGASGNNGMRRDFLVRDCKTGEILTRCTSLSVLMNTRTRRLSTIPDEVRGEIGPAFIDNVAVKDDEIKKLQKLNDSTADYIQGGLTPRWNDLDVNQHVNNLKYVAWVFETVPDSIFESHHISSFTLEYRRECTRDSVLRSLTTVSGGSSEAGLVCDHLLQLEGGSEVLRARTEWRPKLTDSFRGISVIPAEPRV

SEQ ID NO: 111 - protein, 324 aa, Umbellularia californica
MLPDWSMLFAVITTIFSAAEKQWTNLEWKPKPKLPQLLDDHFGLHGLVFRRTFAIRSYEVGPDRSTSILAVMNHMQEATLNHAKSVGILGDGFGTTLEMSKRDLMWVVRRTHVAVERYPTWGDTVEVECWIGASGNNGMRRDFLVRDCKTGEILTRCTSLSVLMNTRTRRLSTIPDEVRGEIGPAFIDNVAVKDDEIKKLQKLNDSTADYIQGGLTPRWNDLDVNQHVNNLKYVAWVFETVPDSIFESHHISSFTLEYRRECTRDSVLRSLTTVSGGSSEAGLVCDHLLQLEGGSEVLRARTEWRPKLTDSFRGISVIPAEPRV

SEQ ID NO: 112 - protein, 382 aa, Cinnamomum camphora
MATTSLASAFCSMKAVMLARDGRGMKPRSSDLQLRAGNAQTSLKMINGTKFSYTESLKKLPDWSMLFAVITTIFSAAEKQWTNLEWKPKPNPPQLLDDHFGPHGLVFRRTFAIRSYEVGPDRSTSIVAVMNHLQEAALNHAKSVGILGDGFGTTLEMSKRDLIWVVKRTHVAVERYPAWGDTVEVECWVGASGNNGRRHDFLVRDCKTGEILTRCTSLSVMMNTRTRRLSKIPEEVRGEIGPAFIDNVAVKDEEIKKPQKLNDSTADYIQGGLTPRWNDLDINQHVNNIKYVDWILETVPDSIFESHHISSFTIEYRRECTMDSVLQSLTTVSGGSSEAGLVCEHLLQLEGGSEVLRAKTEWRPKLTDSFRGISVIPAESSV

SEQ ID NO: 113 - protein, 324 aa, Cinnamomum camphora
MLPDWSMLFAVITTIFSAAEKQWTNLEWKPKPNPPQLLDDHFGPHGLVFRRTFAIRSYEVGPDRSTSIVAVMNHLQEAALNHAKSVGILGDGFGTTLEMSKRDLIWVVKRTHVAVERYPAWGDTVEVECWVGASGNNGRRHDFLVRDCKTGEILTRCTSLSVMMNTRTRRLSKIPEEVRGEIGPAFIDNVAVKDEEIKKPQKLNDSTADYIQGGLTPRWNDLDINQHVNNIKYVDWILETVPDSIFESHHISSFTIEYRRECTMDSVLQSLTTVSGGSSEAGLVCEHLLQLEGGSEVLRAKTEWRPKLTDSFRGISVIPAESSV

SEQ ID NO: 114 - protein, 415 aa, Cuphea hookeriana
MVATAASSAFFPLPSADTSSRPGKLGNKPSSLSPLKPKSTPNGGLQVKANASAPPKINGSPVGLKSGGLKTQEDAHSAPPPRTFINQLPDWSMLLAAITTVFLAAEKQWMMLDWKPKRPDMLVDPFGLGSIVQDGLVFRQNFSIRSYEIGADRTASIETVMNHLQETALNHVKIAGLSNDGFGRTPEMYKRDLIWVVAKMQVMVNRYPTWGDTVEVNTWVAKSGKNGMRRDWLISDCNTGEILTRASSVWVMMNQKTRRLSKIPDEVRNEIEPHFVDSPPVIEDDDRKLPKLDEKTADSIRKGLTPRWNDLDVNQHVNNVKYIGWILESTPPEVLETQELCSLTLEYRRECGRESVLESLTAMDPSGGGYGSQFQHLLRLEDGGEIVKGRTEWRPKNGVINGVVPTGESSPGDYS

SEQ ID NO: 115 - protein, 329 aa, Cuphea hookeriana
MLPDWSMLLAAITTVFLAAEKQWMMLDWKPKRPDMLVDPFGLGSIVQDGLVFRQNFSIRSYEIGADRTASIETVMNHLQETALNHVKIAGLSNDGFGRTPEMYKRDLIWVVAKMQVMVNRYPTWGDTVEVNTWVAKSGKNGMRRDWLISDCNTGEILTRASSVWVMMNQKTRRLSKIPDEVRNEIEPHFVDSPPVIEDDDRKLPKLDEKTADSIRKGLTPRWNDLDVNQHVNNVKYIGWILESTPPEVLETQELCSLTLEYRRECGRESVLESLTAMDPSGGGYGSQFQHLLRLEDGGEIVKGRTEWRPKNGVINGVVPTGESSPGDYS

SEQ ID NO: 116 - protein, 9 aa, Artificial Sequence
  Domain 1 lipid phosphatase catalytic motif
  VARIANT (2)..(2): Xaa = Any Amino Acid
  VARIANT (3)..(3): Xaa = Any Amino Acid
  VARIANT (4)..(4): Xaa = Any Amino Acid
  VARIANT (5)..(5): Xaa = Any Amino Acid
  VARIANT (6)..(6): Xaa = Any Amino Acid
  VARIANT (7)..(7): Xaa = Any Amino Acid
KXXXXXXRP

SEQ ID NO: 117 - protein, 4 aa, Artificial Sequence
  Domain 2 lipid phosphatase catalytic motif
PSGH

SEQ ID NO: 118 - protein, 12 aa, Artificial Sequence
  Domain 3 lipid phosphatase catalytic motif
  VARIANT (3)..(3): Xaa = Any Amino Acid
  VARIANT (4)..(4): Xaa = Any Amino Acid
  VARIANT (5)..(5): Xaa = Any Amino Acid
  VARIANT (6)..(6): Xaa = Any Amino Acid
  VARIANT (7)..(7): Xaa = Any Amino Acid
  VARIANT (9)..(9): Xaa = Any Amino Acid
  VARIANT (10)..(10): Xaa = Any Amino Acid
  VARIANT (11)..(11): Xaa = Any Amino Acid
SRXXXXXHXXXD

SEQ ID NO: 119 - DNA, 1250 bp, Rhodococcus sp.
atgacccgaggcttcgttctccggcaggccgtcggcgccgcactcgccgccaacgccctgcgtcccctgcccggtgcgcccacgtcggtggtcgcgttcttctcagggtggctcaccaccgaactcgcaccgcacctgctcgccgtgaccgccgccgacgccgcccagcacgccgcgcgtcacggaacgcgaacccgaagcgaccgtgtcggcctcgcgctggccgccgcatccgccgccgggctcgccgccgtgatcgccaccggtcgtggcgccggagcggaagccgaatccgcgctcgtcgagacgctcggcgagaactacaccgaccgcgacagcgccatcgaacacccggggcggcccgtgtggcggcaactcctcaacccgttctggatgcggaacaaagcggtcacccgggtccgcaacctcgcgtacgggccgggcgggcgccgggcccgcctcgacatctaccaccggcaggatctgccgtcgaagagcccggtcctcctgcagatccacggcggcggatgggtgatcgggaacaaggatcaacagggtctgccgctcatgctcgagatggcctcgcgggggtgggtgtgcgcggccgtcaactacccgctgtcgccgaaggcgaagtggcccgaacacctgatcgcaatcaagcaggcgctggcctggctccgggagcacgtcgaggagtacggcggcaaccccgacttcatcgccgtcacaggtggttccgcgggtggccacctcgccgccatggtgggactcaccgcgaacgacagtcacctgcagccggggttcgaggacgtcgacacgtccgttcaggcgtgtgtcccgtactacggtgtctacgacatcgccggcgacaccggaatcaaggcggtcctccagcgcgtgcactccggactgatgccgatggtgctcggcaagcacgccacgttccccgacgactaccgggccgcgtccccgctcgcgcacctgcgggcggacgcaccgccgttcttcgtgattcacggcacgagcgattcgctgatccccgtcgccgaggcgcggatcttcgtcgacgagctccggcaggtgtccgacaaccccgtcgtctacgccgaattgaagggcgcgcagcacgcgttcgacgtgttcccctcgatccgcagcatctccgtcacgcaggcggtcgggcgcttcctggaatggtcgcgcagcgccaccaccgacgtgcccgcggcgggcacggaatcggcctg

SEQ ID NO: 120 - protein, 416 aa, Rhodococcus sp.
MTRGFVLRQAVGAALAANALRPLPGAPTSVVAFFSGWLTTELAPHLLAVTAADAAQHAARHGTRTRSDRVGLALAAASAAGLAAVIATGRGAGAEAESALVETLGENYTDRDSAIEHPGRPVWRQLLNPFWMRNKAVTRVRNLAYGPGGRRARLDIYHRQDLPSKSPVLLQIHGGGWVIGNKDQQGLPLMLEMASRGWVCAAVNYPLSPKAKWPEHLIAIKQALAWLREHVEEYGGNPDFIAVTGGSAGGHLAAMVGLTANDSHLQPGFEDVDTSVQACVPYYGVYDIAGDTGIKAVLQRVHSGLMPMVLGKHATFPDDYRAASPLAHLRADAPPFFVIHGTSDSLIPVAEARIFVDELRQVSDNPVVYAELKGAQHAFDVFPSIRSISVTQAVGRFLEWSRSATTDVPAAGTESA

SEQ ID NO: 121 - protein, 183 aa, Escherichia coli
MADTLLILGDSLSAGYRMSASAAWPALLNDKWQSKTSVVNASISGDTSQQGLARLPALLKQHQPRWVLVELGGNDGLRGFQPQQTEQTLRQILQDVKAANAEPLLMQIRLPANYGRRYNEAFSAIYPKLAKEFDVPLLPFFMEEVYLKPQWMQDDGIHPNRDAQPFIADWMAKQLQPLVNHDS

SEQ ID NO: 122 - DNA, 987 bp, Artificial Sequence
  Codon optimized polynucleotide encoding mature form of C8/C10FatB
atgctgccagattggagccgactcttgaccgccatcaccacagtctttgttaagtctaaacggcccgacatgcacgatcgaaaaagcaagcgccccgatatgctggtggacagctttggcttggaatctaccgtgcaggatgggttggtctttcgacagagtttctcgattcgcagttatgaaattggcactgatcgtacggcaagcattgagactctgatgaaccacttgcaagagacaagcttgaaccattgcaaatcgacagggattctcctcgatggcttcggtcgtacgctggaaatgtgcaagcgcgatctgatttgggttgtgatcaaaatgcagattaaggttaaccgttatcccgcatggggtgatacggtggaaattaacacgcggttctcccgcctgggaaaaatcggcatgggacgcgattggctgatctccgattgcaacacgggcgagatcctcgtgcgcgctacttcggcctacgccatgatgaatcaaaaaacccggcgcctcagtaagctgccctacgaggtgcaccaagaaattgttccgttgtttgtggatagccctgtcatcgaggattcggatctgaaggtccataaattcaaagttaaaacgggagactcgatccaaaagggcttgacgccgggttggaatgacctggacgtcaatcagcatgtttcgaacgtgaaatacatcggctggattctggagtccatgccaaccgaagtgttggaaacccaggagttgtgttcgctcgctctcgaataccggcgcgaatgtggccgtgatagtgttctcgagagtgtcaccgccatggaccctagcaaagtcggggtgcgctctcagtatcaacacctgttgcgcttggaagacggcacagcgatcgtgaatggtgcgaccgagtggcgtccgaagaacgccggtgcgaatggtgcaatttcgactgggaagaccagcaatggtaatagtgtcagttag

SEQ ID NO: 123 - DNA, 1561 bp, Umbellularia californica
agagagagagagagagagagagctaaattaaaaaaaaaacccagaagtgggaaatcttccccatgaaataacggatcctcttgctactgctactactactactacaaactgtagccatttatataattctatataattttcaacatggccaccacctctttagcttccgctttctgctcgatgaaagctgtaatgttggctcgtgatggccggggcatgaaacccaggagcagtgatttgcagctgagggcgggaaatgcgccaacctctttgaagatgatcaatgggaccaagttcagttacacggagagcttgaaaaggttgcctgactggagcatgctctttgcagtgatcacaaccatcttttcggctgctgagaagcagtggaccaatctagagtggaagccgaagccgaagctaccccagttgcttgatgaccattttggactgcatgggttagttttcaggcgcacctttgccatcagatcttatgaggtgggacctgaccgctccacatctatactggctgttatgaatcacatgcaggaggctacacttaatcatgcgaagagtgtgggaattctaggagatggattcgggacgacgctagagatgagtaagagagatctgatgtgggttgtgagacgcacgcatgttgctgtggaacggtaccctacttggggtgatactgtagaagtagagtgctggattggtgcatctggaaataatggcatgcgacgtgatttccttgtccgggactgcaaaacaggcgaaattcttacaagatgtaccagcctttcggtgctgatgaatacaaggacaaggaggttgtccacaatccctgacgaagttagaggggagatagggcctgcattcattgataatgtggctgtcaaggacgatgaaattaagaaactacagaagctcaatgacagcactgcagattacatccaaggaggtttgactcctcgatggaatgatttggatgtcaatcagcatgtgaacaacctcaaatacgttgcctgggtttttgagaccgtcccagactccatctttgagagtcatcatatttccagcttcactcttgaatacaggagagagtgcacgagggatagcgtgctgcggtccctgaccactgtctctggtggctcgtcggaggctgggttagtgtgcgatcacttgctccagcttgaaggtgggtctgaggtattgagggcaagaacagagtggaggcctaagcttaccgatagtttcagagggattagtgtgatacccgcagaaccgagggtgtaactaatgaaagaagcatctgttgaagtttctcccatgctgttcgtgaggatactttttagaagctgcagtttgcattgcttgtgcagaatcatggtctgtggttttagatgtatataaaaaatagtcctgtagtcatgaaacttaatatcagaaaaataactcaatgggtcaaggttatcgaagtagtcatttaagctttgaaatatgttttgtattcctcggcttaatctgtaagctctttctcttgcaataaagttcgcctttcaat

SEQ ID NO: 124 - DNA, 975 bp, Artificial Sequence
  Codon optimized polynucleotide encoding mature form of C12FatB1 from Umbellularia californica
atgctgccggattggagtatgttgttcgcggtcattaccaccatcttctcggccgcggaaaagcagtggactaatctcgaatggaagcccaagcctaaattgccgcaactgttggatgatcactttggtctgcatggcctggtcttccgacgaactttcgccatccgctcttacgaggtcggtccagatcgatcgacgtccattctggcggtgatgaaccacatgcaggaagctacactgaatcacgccaagagtgtcggcatcctgggcgatggttttggtacgacgctcgagatgagtaagcgcgatttgatgtgggtggtccgccgcacacatgtggccgtcgaacgctatcctacgtggggtgacacggtcgaagtcgagtgttggatcggagccagcggcaataatgggatgcggcgcgattttctcgtgcgggattgtaagaccggtgaaattctgacacgttgcaccagcctctccgtcctgatgaacacgcggactcgccgcctgtcgactatcccggatgaagtgcgcggcgaaattgggcccgcatttatcgacaatgttgctgtcaaggatgacgagattaaaaaactgcaaaaactcaacgatagcactgccgattacattcaaggcggactcacgccgcgttggaacgacctcgacgttaaccagcacgtgaacaacctcaaatacgtggcatgggtcttcgaaaccgttccagacagcatcttcgaatctcatcatatcagctcgttcacgttggagtatcgtcgtgagtgcacccgggattccgtgttgcgatctctgaccaccgtttccgggggcagcagcgaggctggactcgtttgcgaccacctgctgcaattggaaggcggctcggaggtgctgcgagcacggaccgaatggcgcccgaaattgacggatagctttcggggcattagtgttatccccgccgagccccgcgtttag

SEQ ID NO: 125 - DNA, 975 bp, Artificial Sequence
  Codon optimized polynucleotide encoding mature form of C14FatB1 from Cinnamomum camphora
atgttgcccgattggagcatgttgttcgcagtcatcaccaccattttcagcgcagcggagaagcaatggaccaatttggagtggaaaccaaagccgaatccccctcagctgctggatgatcattttggaccccacgggttggtctttcgccgaacgtttgccatccgcagctatgaagtgggcccggatcgctcgacgagcattgttgctgttatgaatcacctgcaagaagcggctctgaatcatgctaagagcgtgggtatcttgggcgacggtttcgggacaactctggagatgtcgaagcgcgatctgatctgggtggtcaaacgtacccatgtggctgttgaacggtacccggcctggggagatactgtggaggttgagtgctgggttggcgcaagcggcaataacggccgccgacatgatttcctcgtgcgcgactgtaaaaccggcgaaattttgacccgatgcacctcgctcagtgtcatgatgaacacgcgcactcgtcggctgtccaaaatccccgaggaagtccgtggcgagatcggaccggcgttcattgacaacgtggcagtgaaggacgaagaaattaaaaagccgcagaagctgaacgattccacagcggattacatccagggtggtctgacgccccggtggaacgacctcgacattaaccagcacgtcaataacattaagtacgtggattggatcttggaaacagtgccggattcgatttttgagtcgcatcatatcagcagttttacgatcgaatatcgccgcgaatgtacgatggatagcgtgttgcagagcctcacgacagtctctggggggagtagtgaggccggtctggtctgcgaacacctgctccaactcgaaggcggttctgaagtgctccgtgccaaaactgagtggcgccctaaactcactgactcgtttcggggtatttccgtcattccagccgagtccagtgtttag

SEQ ID NO: 126 - DNA, 1430 bp, Cinnamomum camphora
tcaacatggccaccacctctttagcttctgctttctgctcgatgaaagctgtaatgttggctcgtgatggcaggggcatgaaacccaggagcagtgatttgcagctgagggcgggaaatgcacaaacctctttgaagatgatcaatgggaccaagttcagttacacagagagcttgaaaaagttgcctgactggagcatgctctttgcagtgatcacgaccatcttttcggctgctgagaagcagtggaccaatctagagtggaagccgaagccgaatccaccccagttgcttgatgaccattttgggccgcatgggttagttttcaggcgcacctttgccatcagatcgtatgaggtgggacctgaccgctccacatctatagtggctgttatgaatcacttgcaggaggctgcacttaatcatgcgaagagtgtgggaattctaggagatggattcggtacgacgctagagatgagtaagagagatctgatatgggttgtgaaacgcacgcatgttgctgtggaacggtaccctgcttggggtgatactgttgaagtagagtgctgggttggtgcatcgggaaataatggcaggcgccatgatttccttgtccgggactgcaaaacaggcgaaattcttacaagatgtaccagtctttcggtgatgatgaatacaaggacaaggaggttgtccaaaatccctgaagaagttagaggggagatagggcctgcattcattgataatgtggctgtcaaggacgaggaaattaagaaaccacagaagctcaatgacagcactgcagattacatccaaggaggattgactcctcgatggaatgatttggatatcaatcagcacgttaacaacatcaaatacgttgactggattcttgagactgtcccagactcaatctttgagagtcatcatatttccagcttcactattgaatacaggagagagtgcacgatggatagcgtgctgcagtccctgaccactgtctccggtggctcgtcggaagctgggttagtgtgcgagcacttgctccagcttgaaggtgggtctgaggtattgagggcaaaaacagagtggaggcctaagcttaccgatagtttcagagggattagtgtgatacccgcagaatcgagtgtctaactaacgaaagaagcatctgatgaagtttctcctgtgctgttgttcgtgaggatgctttttagaagctgcagtttgcattgcttgtgcagaatcatggcctgtggttttagatatatatccaaaattgtcctatagtcaagaaacttaatatcagaaaaataactcaatgagtcaaggttatcgaagtagtcatgtaagctttgaaatatgttgtgtattcctcggctttatgtaatctgtaagctctttctcttgcaataaatttcgcctttcaat

SEQ ID NO: 127 - DNA, 1744 bp, Cuphea hookeriana
ctttgatcggtcgatcctttcctctcgctcataatttacccattagtcccctttgccttctttaaaccctcctttcctttctcttcccttcttcctctctgggaagtttaaagcttttgcctttctcccccccacaacctctttcccgcatttgttgagctgtttttttgtcgccattcgtcctctcctcttcagttcaacagaaatggtggctaccgctgcaagttctgcattcttccccctcccatccgccgacacctcatcgagacccggaaagctcggcaataagccatcgagcttgagccccctcaagcccaaatcgacccccaatggcggtttgcaggttaaggcaaatgccagtgcccctcctaagatcaatggttccccggtcggtctaaagtcgggcggtctcaagactcaggaagacgctcattcggcccctcctccgcgaacttttatcaaccagttgcctgattggagtatgcttcttgctgcaatcacgactgtcttcttggctgcagagaagcaatggatgatgcttgattggaaacctaagaggcctgacatgcttgtggacccgtttggattgggaagtattgttcaggatgggcttgtgttcaggcagaatttttcgattaggtcctatgaaataggcgccgatcgcactgcgtctatagagacggtgatgaaccatttgcaggaaacagctctcaatcatgttaagattgctgggctttctaatgacggctttggtcgtactcctgagatgtataaaagggaccttatttgggttgttgcgaaaatgcaagtcatggttaaccgctatcctacttggggtgacacggttgaagtgaatacttgggttgccaagtcagggaaaaatggtatgcgtcgtgactggctcataagtgattgcaatactggagagattcttacaagagcatcaagcgtgtgggtcatgatgaatcaaaagacaagaagattgtcaaaaattccagatgaggttcgaaatgagatagagcctcattttgtggactctcctcccgtcattgaagacgatgaccggaaacttcccaagctggatgagaagactgctgactccatccgcaagggtctaactccgaggtggaatgacttggatgtcaatcaacacgtcaacaacgtgaagtacatcgggtggattcttgagagtactccaccagaagttctggagacccaggagttatgttcccttactctggaatacaggcgggaatgtggaagggagagcgtgctggagtccctcactgctatggatccctctggagggggttatgggtcccagtttcagcaccttctgcggcttgaggatggaggtgagatcgtgaaggggagaactgagtggcggcccaagaatggtgtaatcaatggggtggtaccaaccggggagtcctcacctggagactactcttagaagggagccctgacccctttggagttgtgatttctttattgtcggacgagctaagtgaagggcaggtaagatagtagcaatcggtagattgtgtagtttgtttgctgctttttcacgatggctctcgtgtataatatcatggtctgtcttctttgtatcctcttcttcgcatgttccgggttgattcatacattatattctttctatttgtttgaaggcgagtagcgggttgtaattatttattttgtcattacaatgtcgtttaacttttcaaatgaaactacttatgtg

SEQ ID NO: 128 - DNA, 990 bp, Artificial Sequence
  Codon optimized polynucleotide encoding mature form of C16FatB1 from Cuphea hookeriana
atgctgcctgactggtcgatgctgttggctgcaattactaccgtcttcctggcggctgaaaaacaatggatgatgttggactggaagcccaaacgacccgatatgctcgtcgatccgttcgggttgggcagcatcgttcaagacggtctggtgtttcgccaaaatttttccattcgatcttatgaaatcggcgctgaccggacagcatccatcgaaacggtcatgaaccatctccaagagaccgccctgaatcacgtgaagattgccggactctccaatgatggattcggccggaccccggaaatgtacaaacgcgatctgatctgggtggtcgccaagatgcaggtcatggtcaatcggtacccgacctggggggacacggttgaggtcaacacttgggtggcgaaatcgggtaagaacggcatgcgccgcgactggctcattagcgactgcaatacgggcgagatcctcacgcgtgccagttctgtgtgggtcatgatgaaccagaaaactcgacgcttgagcaagattccagatgaagttcgtaatgagattgaacctcattttgttgactcgccccccgtgatcgaggatgatgatcggaagctccccaagctggacgaaaaaacggcggatagcatccgcaaaggcctgacaccacggtggaacgatctggatgtcaatcaacacgtgaacaacgtgaaatacatcgggtggattctcgaatctacccccccagaagttctcgagactcaggagctgtgcagcttgacgttggagtaccgccgagaatgtggccgtgagtcggtgctggagagtctgaccgcaatggacccgtcgggcggtggttatggcagtcagtttcagcatttgctgcgcttggaggatggtggggaaattgtgaaaggtcggactgaatggcgccccaagaatggagtgattaatggtgttgtccctacaggcgaaagtagccccggggattatagttag

SEQ ID NO: 129 - DNA, 2595 bp, Artificial Sequence
  Codon-optimized S. cerevisiae phosphatidate phosphatase (PAH1)
atggaattccaatatgttggtcgggctttgggtagtgttagtaaaacgtggtcgagtatcaaccccgccaccctgagcggcgctatcgatgtcattgtcgtggaacaccccgatggccggctcagttgtagccccttccatgtgcgctttggtaaattccagattctgaaacccagccaaaagaaagtccaggtctttattaacgagaaactgtcgaatatgcccatgaaactctcggatagcggcgaggcgtacttcgtttttgagatgggtgatcaagtgacggatgtcccggatgaactgctcgtctcgccggtcatgagtgccacgagtagtccgccccaatcgccggaaacctcgattctcgaaggcggtaccgaaggcgagggcgaaggtgagaatgaaaataagaaaaaggaaaagaaggtgttggaggagcccgactttctggacattaatgacaccggtgacagcggcagcaagaacagtgagacgacgggttcgctctcgccgaccgaaagtagtacgacgacgccgcccgatagcgtcgaggaacgcaagttggtcgaacaacggaccaagaattttcagcaaaagctgaataagaaactgaccgaaatccatattccgagcaaattggacaataacggtgatttgctcctggacaccgagggttataagccgaataaaaacatgatgcacgacacggatattcagctgaagcaattgctcaaggatgagttcggtaacgatagcgatatttcgagcttcatcaaagaagacaagaatggcaacattaaaatcgtgaacccctatgagcatttgaccgatttgagtcccccgggtacgcccccgaccatggccacgagtggcagtgtcctgggcttggatgcgatggagagtggttcgacgctgaacagcttgagcagcagcccgagcggcagtgacaccgaggatgagacgagctttagcaaggaacagtcgtcgaagagtgaaaaaacgtcgaagaaaggcaccgcgggttcgggtgaaacggagaaacgctacatccgcacgatccggctcacgaatgatcagctgaaatgcctcaacttgacgtacggtgaaaatgacttgaaatttagtgttgaccatggcaaagccattgtgaccagcaaattgtttgtctggcgctgggacgtccccatcgttatcagcgacattgacggtacgattacgaaaagtgatgcgctgggccacgtcctcgccatgatcggcaaagattggacccatctcggcgtcgctaagctgttcagtgagatctcgcgcaacggttacaatatcctgtacctgaccgcgcgctcggccggtcaggctgacagtacccgctcgtatctccgcagtattgagcagaacggtagcaagctcccgaacggccccgtcattctgagccccgatcggaccatggctgccctgcgccgggaggtgattctgaaaaagcccgaagtctttaaaatcgcttgcttgaacgatatccgctcgctctatttcgaagactcggataacgaagtggacacggaggaaaagagcacgccgtttttcgcgggctttggcaatcggatcaccgatgcgctcagctatcggacggtcggcatcccgagtagccgcatcttcacgattaacacggaaggcgaggtgcacatggagctgctcgagctcgccggttaccggagtagctatatccatatcaacgaactggtcgatcacttcttcccgccggtgagcctggactcggtcgatctgcgcacgaacacgagcatggtcccgggcagcccgccgaaccgcaccctggataactttgatagcgaaatcaccagtggccgcaagacgttgtttcgcggtaatcaggaggaaaaattcacggacgtcaacttttggcgcgatccgttggtggacatcgacaacctctcggatatcagtaacgatgattcggacaatattgatgaagacaccgatgtgagccaacagtcgaacatcagccgcaaccgcgctaactcggtcaagacggccaaggtgaccaaggctccgcagcggaatgtgtcgggcagtacgaataacaatgaagttctggctgcgagtagtgatgttgaaaatgccagtgacttggttagcagccactcgagtagcggctcgacccccaacaagtcgacgatgagtaagggtgatatcggcaaacaaatctatctggaactgggctcgcccttggcgagtcccaaactccggtatctggacgatatggatgatgaggactcgaactataatcgcaccaagagccgccgggctagtagcgccgctgctaccagcatcgacaaggagtttaaaaagctcagtgtgagtaaagctggcgctcccacccgcatcgttagcaagatcaacgtgtcgaatgatgtgcacagtttgggcaacagtgataccgaaagccggcgggaacagagcgtcaatgaaaccggtcgcaatcagttgccgcacaatagtatggatgataaggatttggattcgcgggtgagtgacgagttcgatgacgatgagtttgatgaagatgagtttgaggattag

SEQ ID NO: 130 - DNA, 2589 bp, Artificial Sequence
  Synthetic construct Saccharomyces cerevisiae clone FLH148377.01X SMP2 gene
atgcagtacgtaggcagagctcttgggtctgtgtctaaaacatggtcttctatcaatccggctacgctatcaggtgctatagatgtcattgtagtggagcatccagacggaaggctatcatgttctccctttcatgtgaggttcggcaaatttcaaattctaaagccatctcaaaagaaagtccaagtgtttataaatgagaaactgagtaatatgccaatgaaactgagtgattctggagaagcctatttcgttttcgagatgggtgaccaggtcactgatgtccctgacgaattgcttgtgtcgcccgtgatgagcgccacatcaagcccccctcaatcacctgaaacatccatcttagaaggaggaaccgagggtgaaggtgaaggtgaaaatgaaaataagaagaaggaaaagaaagtgctagaggaaccagattttttagatatcaatgacactggagattcaggcagtaaaaatagtgaaactacagggtcgctttctcctactgaatcctctacaacgacaccaccagattcagttgaagagaggaagcttgttgagcagcgtacaaagaactttcagcaaaaactaaacaaaaaactcactgaaatccatatacccagtaaacttgataacaatggcgacttactactagacactgaaggttacaagccaaacaagaatatgatgcatgacacagacatacaactgaagcagttgttaaaggacgaattcggtaatgattcagatatttccagttttatcaaggaggacaaaaatggcaacatcaagatcgtaaatccttacgagcaccttactgatttatctcctccaggtacgcctccaacaatggccacaagcggatcagttttaggcttagatgcaatggaatcaggaagtactttgaattcgttatcttcttcaccttctggttccgatactgaggacgaaacatcatttagcaaagaacaaagcagtaaaagtgaaaaaactagcaagaaaggaacagcagggagcggtgagaccgagaaaagatacatacgaacgataagattgactaatgaccagttaaagtgcctaaatttaacttatggtgaaaatgatctgaaattttccgtagatcacggaaaagctattgttacgtcaaaattattcgtttggaggtgggatgttccaattgttatcagtgatattgatggcaccatcacaaaatcggacgctttaggccatgttctggcaatgataggaaaagactggacgcacttgggtgtagccaagttatttagcgagatctccaggaatggctataatatactctatctaactgcaagaagtgctggacaagctgattccacgaggagttatttgcgatcaattgaacagaatggcagcaaactaccaaatgggcctgtgattttatcacccgatagaacgatggctgcgttaaggcgggaagtaatactaaaaaaacctgaagtctttaaaatcgcgtgtctaaacgacataagatccttgtattttgaagacagtgataacgaagtggatacagaggaaaaatcaacaccattttttgccggctttggtaataggattactgatgctttatcttacagaactgtggggatacctagttcaagaattttcacaataaatacagagggtgaggttcatatggaattattggagttagcaggttacagaagctcctatattcatatcaatgagcttgtcgatcatttctttccaccagtcagccttgatagtgtcgatctaagaactaatacttccatggttcctggctccccccctaatagaacgttggataactttgactcagaaattacttcaggtcgcaaaacgctatttagaggcaatcaggaagagaaattcacagacgtaaatttttggagagacccgttagtcgacatcgacaacttatcggatattagcaatgatgattctgataacatcgatgaagatactgacgtatcacaacaaagcaacattagtagaaatagggcaaattcagtcaaaaccgccaaggtcactaaagccccgcaaagaaatgtgagcggcagcacaaataacaacgaagttttagccgcttcgtctgatgtagaaaatgcgtctgacctggtgagttcccatagtagctcaggatccacgcccaataaatctacaatgtccaaaggggacattggaaaacaaatatatttggagctaggttctccacttgcatcgccaaaactaagatatttagacgatatggatgatgaagactccaattacaatagaactaaatcaaggagagcatcttctgcagccgcgactagtatcgataaagagttcaaaaagctctctgtgtcaaaggccggcgctccaacaagaattgtttcaaagatcaacgtttcaaatgacgtacattcacttgggaattcagataccgaatcacgaagggagcaaagtgttaatgaaacagggcgcaatcagctaccccacaactcaatggacgataaagatttggattcaagagtaagcgatgaattcgatgacgatgaattcgacgaagatgaattcgaagattag

SEQ ID NO: 131 - protein, 864 aa, Saccharomyces cerevisiae
MEFQYVGRALGSVSKTWSSINPATLSGAIDVIVVEHPDGRLSCSPFHVRFGKFQILKPSQKKVQVFINEKLSNMPMKLSDSGEAYFVFEMGDQVTDVPDELLVSPVMSATSSPPQSPETSILEGGTEGEGEGENENKKKEKKVLEEPDFLDINDTGDSGSKNSETTGSLSPTESSTTTPPDSVEERKLVEQRTKNFQQKLNKKLTEIHIPSKLDNNGDLLLDTEGYKPNKNMMHDTDIQLKQLLKDEFGNDSDISSFIKEDKNGNIKIVNPYEHLTDLSPPGTPPTMATSGSVLGLDAMESGSTLNSLSSSPSGSDTEDETSFSKEQSSKSEKTSKKGTAGSGETEKRYIRTIRLTNDQLKCLNLTYGENDLKFSVDHGKAIVTSKLFVWRWDVPIVISDIDGTITKSDALGHVLAMIGKDWTHLGVAKLFSEISRNGYNILYLTARSAGQADSTRSYLRSIEQNGSKLPNGPVILSPDRTMAALRREVILKKPEVFKIACLNDIRSLYFEDSDNEVDTEEKSTPFFAGFGNRITDALSYRTVGIPSSRIFTINTEGEVHMELLELAGYRSSYIHINELVDHFFPPVSLDSVDLRTNTSMVPGSPPNRTLDNFDSEITSGRKTLFRGNQEEKFTDVNFWRDPLVDIDNLSDISNDDSDNIDEDTDVSQQSNISRNRANSVKTAKVTKAPQRNVSGSTNNNEVLAASSDVENASDLVSSHSSSGSTPNKSTMSKGDIGKQIYLELGSPLASPKLRYLDDMDDEDSNYNRTKSRRASSAAATSIDKEFKKLSVSKAGAPTRIVSKINVSNDVHSLGNSDTESRREQSVNETGRNQLPHNSMDDKDLDSRVSDEFDDDEFDEDEFED

SEQ ID NO: 132 - DNA, 861 bp, Escherichia coli
atgagtcaggcgctaaaaaatttactgacattgttaaatctggaaaaaattgaggaaggactctttcgcggccagagtgaagatttaggtttacgccaggtgtttggcggccaggtcgtgggtcaggccttgtatgctgcaaaagagaccgtccctgaagagcggctggtacattcgtttcacagctactttcttcgccctggcgatagtaagaagccgattatttatgatgtcgaaacgctgcgtgacggtaacagcttcagcgcccgccgggttgctgctattcaaaacggcaaaccgattttttatatgactgcctctttccaggcaccagaagcgggtttcgaacatcaaaaaacaatgccgtccgcgccagcgcctgatggcctcccttcggaaacgcaaatcgcccaatcgctggcgcacctgctgccgccagtgctgaaagataaattcatctgcgatcgtccgctggaagtccgtccggtggagtttcataacccactgaaaggtcacgtcgcagaaccacatcgtcaggtgtggatccgcgcaaatggtagcgtgccggatgacctgcgcgttcatcagtatctgctcggttacgcttctgatcttaacttcctgccggtagctctacagccgcacggcatcggttttctcgaaccggggattcagattgccaccattgaccattccatgtggttccatcgcccgtttaatttgaatgaatggctgctgtatagcgtggagagcacctcggcgtccagcgcacgtggctttgtgcgcggtgagttttatacccaagacggcgtactggttgcctcgaccgttcaggaaggggtgatgcgtaatcacaattaa

SEQ ID NO: 133 - protein, 208 aa, Escherichia coli
MMNFNNVFRWHLPFLFLVLLTFRAAAADTLLILGDSLSAGYRMSASAAWPALLNDKWQSKTSVVNASISGDTSQQGLARLPALLKQHQPRWVLVELGGNDGLRGFQPQQTEQTLRQILQDVKAANAEPLLMQIRLPANYGRRYNEAFSAIYPKLAKEFDVPLLPFFMEEVYLKPQWMQDDGIHPNRDAQPFIADWMAKQLQPLVNHDS

SEQ ID NO: 134 - protein, 286 aa, Escherichia coli
MSQALKNLLTLLNLEKIEEGLFRGQSEDLGLRQVFGGQVVGQALYAAKETVPEERLVHSFHSYFLRPGDSKKPIIYDVETLRDGNSFSARRVAAIQNGKPIFYMTASFQAPEAGFEHQKTMPSAPAPDGLPSETQIAQSLAHLLPPVLKDKFICDRPLEVRPVEFHNPLKGHVAEPHRQVWIRANGSVPDDLRVHQYLLGYASDLNFLPVALQPHGIGFLEPGIQIATIDHSMWFHRPFNLNEWLLYSVESTSASSARGFVRGEFYTQDGVLVASTVQEGVMRNHN

SEQ ID NO: 135 - DNA, 1023 bp, Escherichia coli
atgtttcagcagcaaaaagactgggaaacaagagaaaacgcgtttgctgcttttaccatgggaccgctgactgatttctggcgtcagcgtgatgaagcagagtttactggtgtggatgacattccggtgcgctttgtccgttttcgcgcacagcaccatgaccgggtggtagtcatctgcccggggcgtattgagagctacgtaaaatatgcggaactggcctatgacctgttccatttggggtttgatgtcttaatcatcgaccatcgcgggcagggacgttccggtcgcctgttagccgatccgcatctcgggcatgttaatcgctttaatgattatgttgatgatctggcggcattctggcagcaggaggttcagcccggtccgtggcgtaaacgctatatactggcacattcgatgggcggtgcgatctccacattatttctgcaacgccatccaggtgtatgtgacgccattgcgctaactgcgccaatgtttgggatcgtgattcgtatgccgtcatttatggcacggcagatcctcaactgggccgaagcgcatccacgtttccgtgatggctatgcaataggcaccgggcgctggcgcgcgttgccgtttgctatcaacgtactgacccacagcagacagcgatatcgacgtaacttacgcttctatgctgatgacccaacgattcgcgtcggtgggccgacctaccattgggtacgcgaaagtattctggctggcgaacaggtgttagccggtgcgggtgatgacgccacgccaacgcttctcttgcaggctgaagaggaacgcgtggtggataaccgcatgcatgaccgtttttgtgaactccgcaccgccgcgggccatcctgtcgaaggaggacggccgttggtaattaaaggtgcttaccatgagatcctttttgaaaaggacgcaatggcctcagtcgcgctccacgccatcgttgattttttcaacaggcataactcacccagcggaaaccgctctacagaggtttaa

SEQ ID NO: 136 - DNA, 1203 bp, Artificial Sequence
  Vupat1 - nucleotide sequence codon optimized for S. elongatus 7942.
atggccgccacacagacccctagtaaagttgacgatggtgcactgattacggtgctctcgattgacggggggggtatccgcgggatcatccctgggattctcctcgcgttcctcgagagcgaattgcaaaaactggatggtgctgatgcccgtctcgccgactactttgatgtcatcgcaggcacttctaccggaggcttggttactgctatgctgaccgcgccaaatgagaataatcgccccctctacgctgctaaagatattaaagatttctatctcgaacacaccccaaaaatctttccgcagtcgtcgagctggaacctgattgccaccgcgatgaagaagggccgcagcctgatggggccacagtacgacggcaaatacctgcataaattggtccgtgaaaaactgggcaatacgaagctcgagcacactctgaccaacgtggtcatcccggcgttcgacatcaaaaatctgcaacccgccattttcagtagcttccaagttaagaaacgcccctacctcaatgcagccctcagcgacatttgtatctcgaccagcgctgcacccacgtatctgccagcgcactgctttgaaacaaagacttcgacggccagtttcaagtttgacttggtggatgggggcgtcgctgcgaataaccctgcgttggtcgccatggccgaggtctcgaacgaaatccgcaacgagggttcgtgcgcttccctgaaggtgaaaccgctgcagtacaaaaagtttctggtcatttctctgggaaccggctcccagcaacacgaaatgcgatattccgcagataaggccagcacgtggggcttggtcggatggctcagctcgtccggtggcaccccgctgattgacgtcttctctcatgcgagctccgatatggttgattttcatattagtagtgtgtttcaagcccgccacgcagaacaaaactacctgcggattcaagacgataccctgacgggtgatctgggctccgtcgatgttgccacagagaagaatttgaacggtctcgtgcaggtggccgaagcgttgctgaagaagcccgttagcaaaatcaatttgcgtacgggtatccacgaaccggttgaatctaacgaaacgaatgctgaagcgttgaagcggtttgcagcacggttgtctaaccagcggcgatttcgcaaaagtcagactttcgcttag

SEQ ID NO: 137 - protein, 340 aa, Escherichia coli
MFQQQKDWETRENAFAAFTMGPLTDFWRQRDEAEFTGVDDIPVRFVRFRAQHHDRVVVICPGRIESYVKYAELAYDLFHLGFDVLIIDHRGQGRSGRLLADPHLGHVNRFNDYVDDLAAFWQQEVQPGPWRKRYILAHSMGGAISTLFLQRHPGVCDAIALTAPMFGIVIRMPSFMARQILNWAEAHPRFRDGYAIGTGRWRALPFAINVLTHSRQRYRRNLRFYADDPTIRVGGPTYHWVRESILAGEQVLAGAGDDATPTLLLQAEEERVVDNRMHDRFCELRTAAGHPVEGGRPLVIKGAYHEILFEKDAMASVALHAIVDFFNRHNSPSGNRSTEV

SEQ ID NO: 138 - protein, 400 aa, Synechococcus elongatus PCC 7942
MAATQTPSKVDDGALITVLSIDGGGIRGIIPGILLAFLESELQKLDGADARLADYFDVIAGTSTGGLVTAMLTAPNENNRPLYAAKDIKDFYLEHTPKIFPQSSSWNLIATAMKKGRSLMGPQYDGKYLHKLVREKLGNTKLEHTLTNVVIPAFDIKNLQPAIFSSFQVKKRPYLNAALSDICISTSAAPTYLPAHCFETKTSTASFKFDLVDGGVAANNPALVAMAEVSNEIRNEGSCASLKVKPLQYKKFLVISLGTGSQQHEMRYSADKASTWGLVGWLSSSGGTPLIDVFSHASSDMVDFHISSVFQARHAEQNYLRIQDDTLTGDLGSVDVATEKNLNGLVQVAEALLKKPVSKINLRTGIHEPVESNETNAEALKRFAARLSNQRRFRKSQTFA

SEQ ID NO: 139 - DNA, 552 bp, Escherichia coli
atggctgatacattgctgattttgggtgatagtttgtctgcgggttaccgcatgagcgccagcgccgcctggccagccctcctgaatgataaatggcagtccaaaacgagcgttgtcaatgcgtctattagtggcgataccagtcaacagggactggctcgcctcccggccttgctgaaacagcatcaaccgcgctgggtgctggtcgaactcggagggaatgatggtctgcgcggttttcaacctcagcaaaccgagcaaacgctccgtcaaattctgcaggacgttaaggcggcgaacgctgagcccctgctgatgcagattcgcctccccgccaattacgggcgtcgctataacgaagcgttttcggcgatttacccgaagctcgccaaagaatttgatgtcccactgctcccctttttcatggaagaagtctatctcaaaccacaatggatgcaggatgatggcattcatcccaaccgcgacgcgcaaccctttattgcggattggatggcgaaacaactccaaccactcgtgaaccacgattcgtag

SEQ ID NO: 140 - DNA, 1161 bp, Acinetobacter sp ADP1
atggcgtttagatttattgaggggattcccacaagtttgggcgtgttcggtgtggtaggttcattgtgtatgtcgcatgcacatgcaattgaagctgtacagacttctgcaacaattacgcccaccagtcctgcggcttgcattggtttggagtcgaattcagatcgtctggcttgttatgatgctctgtttaaagtagcagatacggcaaaaacaactccagttattgaacaaaaagctgctttgaacccttcgccgtcggtagagcagtctgagctcaatcctcaatctattaaggaaaaaattggtaatctttttgcgattgaaggtccaagaattgatccgaatacatccttactggataggcgctgggagctctccgaaaaatcaaaattaggtacatggaatattcgtggttataaacctgtctatttattacctattttttggacatctaaaaagaatgaatttccttcgagtccaaatcctgaaaatacagtgcatgaaaatcagaatttaacttcggctgaatccaagtttcaattatctttaaaaaccaaagcctgggaaaatatttttggcaataacggagatttatggctagggtatacccagtcttctcgttggcaggtttacaatgcagacgagtcacgtccgtttcgtgaaaccaattatgaacctgaggcaagcctaattttccgaaccaattatgagttcttgggattaaacggccgacttttgggggtaactttaaatcaccagtcaaatggtcgttctgatccattatcaagaagctggaatcgtgtcatctttaatataggattagagcgagataattttgcgctggtactcagaccatggattcgtattcaagaagaagccaagaacgacaataatcccgatatcgaggattatgtaggacgtggtgatttaactgctttttatcgctggaaagataatgatttttctttaatgctgcgtcattcattaaaagatggtgataaatcgcatggtgcggtgcagtttgattgggctttcccaatttcaggtaagcttcgtggaaattttcagttatttaatggttacggtgaaagcctgattgattataaccatcgtgcaacttatgttggtttgggcgtttcactgatgaactggtattga

SEQ ID NO: 141 - DNA, 870 bp, Escherichia coli
atgcggactctgcagggctggttgttgccggtgtttatgttgcctatggcagtatatgcacaagaggcaacggtgaaagaggtgcatgacgcgccagcggtgcgtggcagtattatcgccaatatgctgcaggagcatgacaatccgttcacgctctatccttatgacaccaactacctcatttacacccaaaccagcgatctgaataaagaagcgattgccagttacgactgggcggaaaatgcgcgtaaggatgaagtaaagtttcagttgagcctggcatttccgctgtggcgtgggattttaggcccgaactcggtgttgggtgcgtcttatacgcaaaaatcctggtggcaactgtccaatagcgaagagtcttcaccgtttcgtgaaaccaactacgaaccgcaattgttcctcggttttgccaccgattaccgttttgcaggttggacgctgcgcgatgtggagatggggtataaccacgactctaacgggcgttccgacccgacctcccgcagctggaaccgcctttatactcgcctgatggcagaaaacggtaactggctggtagaagtgaagccgtggtatgtggtgggtaatactgacgataacccggatatcaccaaatatatgggttactaccagcttaaaatcggctatcacctcggtgatgcggtgctcagtgcgaaaggacagtacaactggaacaccggctacggcggcgcggagttaggcttaagttacccgatcaccaaacatgtgcgcctttatactcaggtttacagcggctatggcgaatcgctcatcgactataacttcaaccagacccgtgtcggtgtgggggttatgctaaacgatttgttttga

SEQ ID NO: 142 - DNA, 1188 bp, Streptomyces coelicolor A3(2)
atgaccgtcgttgaaccgactcccggtgccgaccgggtcagcatccaacggctgcgtcgccgtttggaaaggctgatcggtgtcgccgccaccgaagggaacgaactcgtcgcgctgcgcaacggcgacgagatcttccccgccatgctgggggcgatccgggcggccgagcacacgatcgacatgatgacgttcgtgtactggcgcgggcagatagcccgcgacttcgccgccgctctcgccgaccgggcccggtcgggagtacgggtccggctgctgctggacggcttcggcgccaaggagatcgaacaggacctgctggacgctatggaggccgcgggagtacagatcgcctggttccgtaaaccgctgtggctgtcgccgttcaagcagaaccaccgctgccaccgcaaggccctcgtcattgacgagcacactgccttcaccggaggcgtcggcatcgccgaggagtggtgcggcgacgcccgcggccccggcgagtggcgcgacacccacgtccaggtgcgcggcccggccgtggacggcgtcgccgccgccttcgcccagaactgggccgagtgccacgacgagttgtacgacgaccgggaccggttctccgatcacacccagcccggcacatccatcgtccaggtggtgcgcggttcggccagcttcggttggcaggacatgcagaccctcatccgcgtcatgctcacctccgcggagcaccgcttccgcctggcgaccgcctacttcgccccggatacatacttcatcgacctgctctgcgccaccgcccggcgcggtgtcacggtggagatcctgctccccggcccgcatacggaccagcgggcctgccaactggccggccagtaccactacacccgtttgctggacgccggggtgtcaattcgcgagtaccagccgaccatgatgcacgccaagatcatcaccgtggacgggctggccgccctgatcgggtccaccaacttcaaccggcgctccatggaccacgacgaggagatcatgctcgccgtcctggaccaggagttcaccaacggcctggaccgggacttcgacgccgacctggaacgcagcaccgccatcgagccgacccgctggaagcgccgcgccaccctgcgacgcctccgggagacggccgtcctgcccctgcgccggttcctgtga

SEQ ID NO: 143 - DNA, 658 bp, Arabidopsis thaliana
attcgtcttctaccttcttctaactcacttcattttcaccaaaaccaacaaatatattcttctcactttccgagctttccagttcaactatggcggctccgatcatacttttctctttccttttattcttctctgtctctgtctcggcacttaacgtcggtgttcagctcatacatccctccatttccttgactaaagaatgtagccggaaatgtgaatcagagttttgttcagtgcctccatttctgaggtatgggaagtactgtggactactttacagtggatgtcctggtgagagaccttgtgatggtcttgattcttgttgcatgaaacatgatgcttgtgtccaatccaagaataatgattatctaagccaagagtgtagtcagaagttcattaactgcatgaacaatttcagccagaagaagcaaccgacgttcaaaggtaacaaatgcgacgctgatgaagtgattgatgtcatctccattgtcatggaagctgctcttatcgccggcaaagtcctcaagaaaccctaactatttatatatatttttctatatttctagttacaattgtttccctttttttccccctcaggacatttgtcttaatttatcaaaatactattaagtaatactatagcttttttttttttgtc

SEQ ID NO: 144 - DNA, 1074 bp, Arabidopsis thaliana
atggagtatcaggggcttcaaaattgggacggtcttttagacccattggacgacaatctccggcgagagattctccggtacggtcaatttgtcgaatcggcttatcaagcatttgatttcgatccttcctctccaacctacgggacatgccggtttccgaggagcacgttgttagagcgatccggtttacccaactccggttatcgactaacgaagaaccttcgtgccacgtcaggtattaacttgccacgttggattgagaaagcgccaagctggatggctacacaatctagctggattggttacgtggcagtttgccaggacaaagaagagatctcgcggcttgggcgtagagacgtcgtcatctccttccgtggaaccgccacgtgtctcgagtggttagagaaccttcgcgccacgctgactcatctccctaatgggcctactggagcaaatctaaacgggtctaactctgggcccatggttgagagcgggtttttaagcttgtatacttcaggtgttcacagtttgagagacatggtaagagaagagatcgcaaggctactccaatcttacggcgacgagccgttaagtgtaacgataaccggtcacagcctcggcgctgcgatcgcgacactagcagcttacgatatcaaaacgacgtttaaacgtgcgcctatggttaccgtaatatctttcggaggtccacgtgtcggaaacagatgctttcggaaactccttgagaagcaaggcacgaaggttctaagaatcgtgaactccgacgacgtcatcaccaaagttcctggagttgttttagaaaacagagagcaagataacgttaagatgacagcgtcgataatgccgagctggatacagagacgcgtggaggagacgccgtgggtttacgctgaaatcggtaaggagcttcggctgagtagccgtgactcgccgcacttgagcagcatcaatgtggccacgtgtcatgagctgaaaacgtatttacatttggtagacgggtttgtgagctccacgtgtccattcagagaaacagctcggagagttctccatagatga

SEQ ID NO: 145 - DNA, 1416 bp, Arabidopsis thaliana
atggcggccaaagtcttcactcagaaccctatctattctcaatctctagttagagacaaaactcctcaacagaaacacaatcttgaccatttctctatatcccagcacacctctaaaagactcgttgtctcttcttctacaatgtcccctccgatttcatcttctccactctctcttccttcttcttcttcttctcaggccattcctccttctcgagcacctgcagtgactctaccgttgtctcgggtttggagagagatacaagggagcaataactgggaaaatctcattgaacctctaagccctattctccaacaagagatcactcgctacgggaacttactctccgcttcttacaaagggtttgatctaaaccctaactccaaacgttacttgagttgcaagtatggaaaaaagaacttgcttaaagaatccggaatccatgaccctgatggctaccaagtcaccaagtatatctacgccacaccagacatcaacctcaaccctatcaagaacgagcctaaccgtgcacgttggatcggttatgtagcggtttcttctgatgaatcggtgaaacgtttgggaaggagggatattttggtgacgtttcgtggcactgtcaccaaccatgagtggttagctaacctaaagagctctttgactccggctaggcttgatcctcataaccctcgtcctgatgtcaaggtcgaatccgggttcttaggtttatacacatccggtgagagcgagagcaaattcgggctagaaagctgccgtgagcagcttctctccgagatctcgaggcttatgaacaagcacaaaggcgaggaaataagcataacacttgcgggacatagtatggggagttctctagctcagcttctagcttacgacatagcggaactcggtatgaaccagagaagggacgaaaaacctgttccggtgaccgtgttttcgtttgctggtcctagagttggtaacttggggttcaaaaaacggtgtgaggagctaggagttaaagtcttgaggatcacgaatgtaaacgatccgatcaccaaacttccaggtttcttatttaatgagaatttcagatctttaggtggtgtttacgagcttccttggagctgttcttgctacactcacgtgggagtcgaactcaccctcgatttcttcgatgttcaaaacatttcttgtgtccatgacctcgagacttacatcactctagtaaaccgtccgagatgctcgaaattggcggttaatgaagacaattttggcggcgagtttttgaacagaacaagtgaactgatgttcagtaagggacgacgtcaagcgttgcattttacaaacgcagcgaccaatgcggcatatctactttgttctatatccaaccatatgttgtattataatatattttag

SEQ ID NO: 146 - DNA, 1285 bp, Arabidopsis thaliana
aatcgccctccaagaaaaacaaaccgccatcgtgcggatcactcgtaaccatcctcagccttgatggtggtggagtcagaggaatcatcgccggagtaatccttgcctttctcgaaaaacaacttcaggaactcgatggagaagaggcgaggcttgcggattacttcgacgtgatagctggaactagcaccggtggtcttgtgacggcgatgttgactgtaccggacgagaccggtcgacctcatttcgcggctaaagacattgtgccgttttaccttgaacattgtcccaagatatttccccagcccacaggcgtgcttgctctgttaccgaagcttccaaagcttctgtctggtccaaagtacagcggaaagtatctgcgaaatcttctgagtaagcttcttggagagacaagacttcaccagaccctcacaaacattgttatacctaccttcgatatcaagaaacttcaacccactattttctcctcttaccagctgttggttgaccctagcttggatgtcaaggtatcagacatatgcatcggcacttcagctgctcccactttctttcctccccattacttttccaacgaagacagtcaaggcaataagacggagtttaatctcgttgatggcgcggttactgctaataacccgactttggtggccatgacagctgtgtctaagcagattgtgaagaataatcctgatatgggtaagctcaagccgttaggtttcgaccggtttctcgttatatcgataggaacaggatcaacaaaaagggaagagaagtacagcgcaaaaaaggctgcaaaatgggggatcatatcttggttatatgacgatggatctactccgatattagacattaccatggaatcaagccgcgacatgatccattatcacagctctgttgtgtttaaagccctacaatctgaagacaagtacctccgaatcgatgatgatacattggaaggagatgtaagcactatggatctagcgacaaagtctaacttggagaatcttcaaaagattggagagaagatgctgacaaacagagtcatgcaaatgaacatcgacactggtgtatatgaacctgttgctgaaaatattaccaatgatgaacagctaaagaggtatgcaaaaattctctcggacgaaaggaaattaaggagactaagaagcgacacaatgattaaagattcatcaaatgaatcacaagagataaaataaaaggaaatcattcgtgcttttgtgtgaaattgtttgttgcatatgtttta

SEQ ID NO: 147 - DNA, 2061 bp, Anabaena variabilis ATCC 29413
gtgataaatctagcaaatacacaaacagtcttaaaatttgatgggatagatgattatatagattttggcaaaaacgatattggtggtgtttttgctcaagggagttcatgttttacggtttcaggatggataaatcctcataaattaacagaaaaatccactagctatggaacgcggaatgtattttttgctcgttcttcagatcgatacagtgataattttgaattcggtatcagtgagacagggagtttagatatcttcattgatgaaaccattagcaagggtatcagaacttttggtaatggagaattaactataggacaatggcactttttcgccattgtttttaatagcggtcaaatcacagtatatcttgatgatcatgaatacaatgactctctgagaggttcatctttaaacaaagcaacaagctctgtaactttgggtgcaaccttacacaagcaagtctattttacaggacaattagcaaacatcagcgtctggaattatccatgtactcaggtacaaattaagacccatcattgtgggctaatagtcggggatgaaccaggattagtggcttactggaaattagatgaaggccaaggaacaacagttaaaaacaaagctggaaaatcttatcaaggaaattttcggggtaatcctagctgggatttagcgcaaattccatttgcagcaccattatccagtcaagacgatatccaggaggatgtccaatttgagataggaattattgccgaaacaagtatttcaacattaactacagatttattggcagcaacagtaccgctagttagtaacaacgaagaccaaacaatagaaattcaatatccagaaataaatagcgaaaaatcagagattattgcaaacttgatcaatctcccatcacatgaagaagcaagcaaaacagaccaaactgaagttcttgtaaatagccaacaattacaaacattcattcaggcagaatcgccagaaaccatgaatacaaaatcccgtcccagatataaaatactttccattgatggtggtggtattcggggcattattcctgcattactcttagcagaaattgaacgacggacacaagagcctatatttagtttatttgacttaattgctggtacttcaagcggcggaattttagcactgggactaactaaaccccgattaaattcatctgaagaattgcccttagctgaatacaccgctgaagaccttgtacaattatttcttgagtatggagtagaaatattttatgagccattatttgaaagactacttggcccgttagaagatatatttctccagccaaaatatccttccacaagcaaagaagaaatcttaaggcaatatttgggtaaaactcctctagtaaataatcttaaagaagtttttgtcactagttacgatatcgagcagcgaattccggtattttttacaaaccaactagaaaaacagcaaatagaatctaagaattctcataatttatgtggtaatgtatccctcttagatgccgcattagccactagtgctaccccgacttattttgctcctcatcgtatcgtcagccccgaaaatagtgcgatcgcttatactttaattgacgggggagtatttgctaataacccagcccatttagctattttagaagcgcaaattagtagtaaacgcaaagcccaaacagtccttaatcaagaagatattttagtagtttctttaggtacaggttcgccaacaagtgcttatccttataaagaagtcaagaattggggacttttacaatggggaagaccacttttaaatattgtgtttgacggtggtagcggtgtggtatctggagaattagaacagttgtttgaacctagcgataaagaagctaaaagtttttattatcgctttcaaacattgttagatgcagagttagaagcaatagataatacgaaactacaaaatactcgtcagctacaagctatagcccacaaactgatttctgaaaaaagtcaacaaatcgatgaactttgtgagcttttgttgggctaa

SEQ ID NO: 148 - DNA, 1995 bp, Saccharomyces cerevisiae S288c
atgaagttgcagagtttgttggtttctgctgcagttttgacttctctaacagagaacgttaacgcttggtcaccaaataacagttacgtccctgcgaacgtaacctgtgatgatgatattaacttagtcagagaagcatctggtttgtcagataacgaaacagaatggctgaaaaaaagagatgcatacaccaaggaggctttgcattcttttttgaatagggccacttcgaatttcagtgacacttccttgctatccactctttttggtagcaactcttccaatatgcctaagattgccgtcgcctgttctggtggtggttaccgtgccatgttgtctggtgctggtatgcttgctgctatggacaatcgtactgatggcgcaaatgagcatggtcttggtgggctgctgcaaggtgcaacttacttggcaggtctgtcgggtggtaactggttaacaagtactttggcttggaacaactggacgtctgtgcaagctatcgtggataatacaacagaatctaactcaatttgggacatctctcattcaattcttaccccagacggcattaacatctttaagactgggagtagatgggacgacatatcagatgacgttcaggataaaaaagacgccggtttcaacatctctttggcggatgtttggggccgtgctcttgcgtacaatttttggccaagcttacaccgtggtggtgtagggtacacatggtcaactttaagggaagctgatgtcttcaagaatggagaaatgcccttccctatcactgttgcagacggtagatacccaggtaccaccgtgataaacttgaatgccactcttttcgaatttaatccctttgaaatgggttcatgggaccccactttgaacgcatttacggatgtgaagtatttaggtaccaacgttacaaacggtaaaccagttaataaaggccaatgcattgccgggtttgataacactggtttcataacagccacttcatctacgttgtttaaccaatttttactaagattgaattctaccgatttaccttcatttattgctaacttagccaccgatttcctggaagatttatccgacaatagtgacgatattgcaatttacgccccaaatccattcaaggaagctaattttcttcaaaagaacgcaacctccagtattatcgaatcagaatatctatttttggttgatggtggtgaagataaccaaaatattcctttagttccattgttgcaaaaggaacgtgaactagatgttatttttgcattagacaattctgctgatactgacgactattggccagatggtgcttcattagttaacacttatcagcgtcaatttggcagccaaggtctcaatttgtctttcccatatgttccagatgtgaacacatttgtcaacttggggttgaacaaaaagccaaccttttttggttgtgatgcaagaaatttgacagacttggagtacattccaccattaattgtttacattccaaattcaagacattcatttaatggtaaccaaagtacttttaagatgtcatactccgattcagaacgtcttggtatgattaagaatgggtttgaagctgccacaatgggtaattttactgatgattctgatttcttgggctgtgttggttgcgccattatcagacgtaagcaacaaaacttgaatgctacattgccctctgaatgcagccagtgttttaccaactactgctggaacggtactattgacagcaggtcagtctcaggtgtaggaaatgatgattattcttcttctgcttccttgtctgcctccgccgctgctgcctctgcctctgcctctgcctctgcttccgcctctgcctctgcttctgggtcttccactcataagaaaaatgcgggcaatgctttggtgaattattctaacttaaacactaacacttttattggtgtcttaagtgtcattagtgccgtcttcggtctaatttag

SEQ ID NO: 149 - DNA, 2121 bp, Saccharomyces cerevisiae S288c
atgcaattacggaacatattacaggctagctcgctaatttctggactttcgctcgctgcagattcgtcgtccactactggtgatggttatgctccatcaataattccttgtcccagtgatgatacctctttagttagaaacgcgtctggcttatctaccgctgaaactgattggttaaagaaaagagatgcgtacactaaagaagctttacattccttcttaagcagagctacttctaacttcagtgacacttctttgctatccactcttttcagtagtaactcttccaatgtacccaaaattggtattgcatgctctggtggtggttatcgtgccatgttgggtggtgctggtatgattgctgctatggacaatcgtactgatggtgctaacgagcatggtcttggtggtttactacaaagttccacgtatctatcgggtttgtccggtggtaactggttgactggtactttggcatggaacaattggacctctgtacaggaaattgtagaccatatgagtgagagcgattccatctggaatatcacgaaatccattgtgaaccctggtggctctaatttgacctacacaattgaaagatgggagtccattgtacaagaagtgcaggctaagtctgatgcaggcttcaatatatctttgtcggatttgtgggcccgtgcactttcttacaacttctttccaagcttgccagatgctggctccgctttgacttggtcctctttgagagatgttgatgtgttcaaaaacggtgaaatgcctttaccaattactgttgcagatggtagatacccaggtaccaccgtgataaacttgaatgccactcttttcgagttcactccatttgaaatgggttcttgggatccttctttgaacgcttttacggatgtgaaatatctaggtaccaacgttacaaatggtaaaccggtcaacaaggatcaatgcgtttctggttacgataatgctggatttgtaattgccacatccgccagtttattcaacgaattttccctggaagcttccacttcgacctattataaaatgattaatagttttgccaacaagtacgttaacaacctatcccaagatgacgatgatattgcaatttacgctgcaaatccattcaaggatacagaatttgttgaccgcaattacacttccagtattgttgatgccgatgatttgtttttagttgatggtggtgaggacggccaaaatttgccgttggttccactaatcaagaaggaacgtgacttggatgtggtgttcgcattggatatatccgacaatactgatgaatcatggccaagtggtgtgtgcatgacgaacacttatgagcgccagtattctaagcaaggtaaaggaatggctttcccatatgttccagacgttaacaccttccttaacttgggcttaactaataagccaacgttttttggttgtgatgcaaaaaatttgacggacttggagtatattccacctttagttgtatatatcccaaacacaaaacattcattcaatggtaaccaaagtactttgaagatgaactacaatgttacagaacgtcttggaatgatcagaaatggttttgaagctgctacaatgggcaactttacggatgactctaactttttaggttgcataggttgtgccatcattagacgtaagcaagaaagcctaaatgccaccttgccccctgaatgtaccaaatgttttgcggattactgctggaacggcacactaagtacctcagctaatcctgaactatcgggaaatagtacgtatcaaagcggtgctattgcctctgcaatctctgaggctactgacggtattccaataacggctctcttaggttcatcaacctccggaaatactacatcaaactcaacaacctcgacttcatcaaatgtcacttctaactcaaactcttcgtcaaatacaactttaaactcaaattcttcatcctcttcaatttcttcctctacagctcgttcttcttcctctacggcaaacaaagcgaatgctgcggctatttcctatgcgaacactaatactctaatgagtttgttaggtgccataacagcattatttggactaatttag

SEQ ID NO: 150 - DNA, 636 bp, Acinetobacter sp. ADP1
atgcaactgtataacatgtttttagacgggaaatgggcaaaatggttcttgattggttcatttagcgtaataccttttacagtttcggcaaaaaccattcttatcttaggcgacagtctgagtgcgggttatggcattaaccccgaacagggctgggtcgctttattacaaaaacgtctggatcaacaatttcccaagcagcataaagtcattaatgccagtgtaagtggggaaaccaccagtggtgctttagctcgtttacccaaactacttactacttatcgacctaatgtggtggtcattgagcttggtggtaatgatgcattaagaggacaaccgcctcaaatgattcaaagtaatctggaaaaattaatccagcacagccaaaaggcaaaatctaaagtcgtggtgtttggaatgaaaataccaccaaattatggcactgcctatagtcaggcatttgaaaataattataaggtagtgagtcaaacatatcaggttaagttgttgccattttttcttgatggtgtggctggacacaaaagtctaatgcaaaatgaccagatccatccaaatgccaaagcccagtcaatcttgctaaataacgcatacccatatattaaaggcgctttataa

SEQ ID NO: 151 - DNA, 1029 bp, Acinetobacter sp. ADP1
atgtcagatatcccgtttctgaatccgacaatactacaacagcttgatttacctgtacctagtcgtgatcaaacccctttagtgttgcctcagttaaatctcaatcattcttttgagccttcacgtgatttattggcctatcgaaagttatatggtttagatctactggctggtgattactggcaaggctatattcagatgcccttgtttcgtttacatgtacaagtttttacgccagaaagagaaattccattaggaacggtgtgcttattacatggctatcttgaacatagtggtatttatcaaccgatcatccgtgaaatactggatcaaggttttagtgtggtcacttatgatctgcctggacatggattaagtgatggatcacccgctaatattcagaattttgatcattatcaacaggttttaatggcggtttaccagtatgttaaaaatgcagatcagttgcctaaaccttggttaggaattggtcaaagtacaggtggcgcaatctggatgcatcatttgttggaatatgcagagaaacgacaagatccgattgttgatcgggtattactattgtcaccactcatacgcccagcaaaaacggcatggtggcataattctgtgggtttaggcattattcgaagaattcgtcgtcaagttccaagacattttagacgtaataatcataatcctgagtttttacgttttatccgtcttaaagatccgttacaaccacgcatgatgggaatggactggatacttgcgatgtcaaaatggatgtttgaaatggaacagcgaccagcctgtcgtataccagtatggcttgcacaaggggcattagatcagactgtagattggcgttataacattgaatttattcgacgtaaatttcgcttacaaaccttgttgatgttagaagaaggatctcatcaactcatcaatgagcgcgctgatattcgtgctgctttgacaggacttattccagcatttttacatgctcgtccaaaacatcattattattaa

SEQ ID NO: 152 - DNA, 840 bp, Rhodococcus jostii RHA1
atgcagcatcgagaatcatccttcgccggcgtcggcggaattcccatcgtctacgacgtgtggctccccgagcggcgcccgcgcggcgtgctggttctgtgccacggcttcggcgagcatgcccggcggtacgaccatgtgatcgaacggctcggggaactcgacctcgcgatctacgcgcccgaccaccgtgggcacgggcggtcgggcggcaaacgggtccatctgaaggactggaccgagttcaccgacgacctgcaccagttgttcggcatcgcgtcgacggactggcccggcaccgaccggtttctcctcgggcacagcatgggcggttccatcgcgctgacctacgcactcgaccaccagcaggacctgaaggcactcatgctgtccgggcctgcggtcgacgtgacgagcggcacgccgcgcatcgtggtggagatcggcaagctggtgggtcgcttccttcccggagtgcccgtcgagtcgctcgacgcgaagttggtctcccgcgatcctgcggtcgtgtcggcctacgaggaggatcccctcgtccaccacgggaaggtgcctgccgggattgcgcgcgggatgatcctcgccgccgaacggttgccggaacgtctgccgtcgctgacgattcccctgcttctccagcacggccaggacgacggactcgcgagtgtgcacggcacggaactgatcgcggagtacgtcggttcggaggatctcacggtggagatctacgaaaacctgttccacgaggtgttcaacgaaccggagaacgaggaggtactcgacgacctcgtcgagtggttgcggccgcgcgtgcaggcctga

SEQ ID NO: 153 - DNA, 2546 bp, Artificial Sequence
  Codon optimized SDP1
catatggacatcagtaatgaggcaagcgttgacccctttagtattgggccgtcttcgatcatgggccgaaccatcgcttttcgagttctcttctgtcgcagcatgagtcaactgcgccgggatttgttccgctttttgctccactggtttctgcgctttaaactgacggtgagtccattcgtctcctggttccacccgcgcaatccacaaggcattctcgcggttgtcaccatcattgcctttgtcttgaaacgctatacgaatgtgaagatcaaagccgagatggcgtaccgtcggaagttttggcggaacatgatgcggacagcattgacttacgaagagtgggcccatgcagctaaaatgctggagaaggagacgccgaagatgaatgagagcgatctctatgacgaagaattggttaaaaacaaactgcaagagctgcggcatcgccgtcaagaaggatcgctgcgcgatatcatgttttgcatgcgagcggacctggtccgcaatctgggcaacatgtgtaacagtgagctgcataaagggcgactccaagtgccccgccacatcaaagaatatatcgatgaagttagtacccagctgcgcatggtttgcaattcggatagcgaggagctgagcttggaagagaaactctcgttcatgcacgaaacacgtcatgcgtttggtcgcactgctttgttgctgtccgggggtgcgtccctgggtgcattccatgtcggagtggtccgaacgctggtggagcacaagctgctgccccgaatcattgcgggctccagcgttggtagcatcatctgcgcagttgtcgcttcccggagttggccggagctgcagtcgttttttgaaaacagcctccatagtttgcagtttttcgatcagctcggaggagtgttctccatcgtgaagcgcgttatgacgcagggtgccctccatgacattcggcaattgcaatgtatgttgcgaaacctcacctcgaacctcactttccaggaggcttatgacatgacaggtcgaatcttgggaattaccgtgtgttcgcctcgcaagcacgaaccgccacgttgtctcaattacctgacctcgccccatgtcgtcatctggagtgccgtcacggcgagttgtgcgtttcctggcttgttcgaggcacaggagttgatggcgaaagaccgcagcggcgaaattgttccgtaccatcctccgtttaatctcgatccagaggtggggacgaaaagctcgagcggccggcgctggcgcgatgggagcctcgaagtcgatctgcccatgatgcagttgaaggaactctttaacgtcaatcacttcatcgtgagccaggccaatcctcatattgcacccctgctccgactcaaggatctggtgcgcgcatacggtggccgttttgccgcaaaattggctcatttggtcgagatggaagtgaaacaccggtgcaaccaggtgttggaactcggcttccccctgggcggcctcgccaaactgtttgcccaagaatgggaaggtgatgtcacggttgtcatgccggcgaccctggctcagtatagcaagatcattcaaaatccgacccatgtggaactccaaaaggccgccaatcaagggcgtcgttgcacttgggagaagctgtctgcgatcaagagtaactgcggtattgaactggccctggatgatagcgtggcgattctcaatcacatgcgccgcctgaagaagtccgccgaacgagccgccactgcgacctcgtccagccaccacggcttggcctccaccacgcgctttaatgcttcgcggcgcatccccagttggaatgtcctggcccgtgagaactctacgggttctctcgatgacctggtcactgacaacaatctccacgcgtccagtggtcgcaacctgtcggattctgaaacagagtcggtcgaactgtcgtcctggactcggacggggggcccactgatgcgcactgctagtgctaataagttcattgatttcgtgcagtctctcgatattgacatcgcattggtgcgtggtttttcgtcgagcccgaactcgcctgccgtgcctcctggcgggagcttcacacccagtccccggagcattgctgcgcattctgacattgagtctaactcgaacagcaataatctgggaacctccacatccagtattactgtgacagagggtgatctcctgcaacccgaacgtacctctaatggcttcgttctcaacgttgtgaaacgggaaaacttgggcatgcctagcattggcaaccaaaacaccgaactgccggaaagcgttcaactggacattcctgaaaaagagatggattgcagcagcgtgagcgagcatgaagaagacgacaatgataacgaggaagaacataacggaagttcgttggtcaccgtttcttcggaggacagtggtctgcaggaacccgtgtctgggtccgtgattgatgcttaggaagagcaaatcgataagctcttcgttactatccatacgatgttcccgattacgcttagagatct

SEQ ID NO: 154 - DNA, 1506 bp, Acinetobacter sp. ADP1
atgttaggcataaaaaagtcagatatgaatccttatcaagctcatcgcataaaaaaattaaaataccagcttgaaaatgccgaaagctatgaagagtggaaatctaccgcattgcaactcgatgaagaaacgggtttgcaagaatggaaatatgataactgttctgcctattttgatgctgagctgatctcataccgactcaatttattacgtaaatatcgcctgcaacagcgcgtcatggattctgtatatctgttacaggagggattaacgcatgatattgccaacattggacatccaatgctttttgcagccacttatgttggaaccaagcaaattatcgaggactatattgaggaagtatctttatcactcgcatttattgcggcaagtcaatgtcagaccttaacggtggcagagaaactcaaattctttaaaaattgtcaaaagacctatggacagccagcactcatgttttcaggtggtgctactttgggtttgtttcatagtggagtatgtaaaactctgatccagcaagatttgatgccgagagtgttatcaggctcaagtgctggtgcgattatggctggtatgcttggtacttcaactgcatcagaatttcagaaaattttattaggcgaaaacttttttagtgaggcttttcattttcgtggtgtcagagacctgcttaaaggaaatggcggttttgcggatgtgaaatatctgaaaaagtttttgattgaaaatctgggcgacttaaccttttcagaagcgtatgaaagatctggattgcatattaatgttgctgttgctccttatgatggctcgcaaaatgcaagaatcttaaatgcgtacactgcacctaatcttttggtctggagtgctgtgttggcttcatgtgcagtgcctgttttatttccgcctgtacgtctgaccagtaaaaaacgtgacggtagccatacgccttatatggccaatactaaatgggtagatggcagcgttagaagtgattttccacaggaaaaaatggcgcgtttatataatttgaattatacgattgccagtcaagtcaatccgcatgtggttccttttatgcagagcgatgcatcacgctatcgaaaggatattctgagttggccgcaacgtattttacgtcgtcaaggtaaagtgatttcattaggcatcatggattttacccgtgaacgattaggcaatgttccgccagtcagacgcttgcttgatcatggttatggcatagtggggcagaggtattatggtgacgtcaatatcattgcgccgttcaatctgcggcagtatgcatatatgctgcaaaaccctcgaccacacttatttaagttacttcaacagcagggagagcgtgccacatggccaaaaatttctgccattgaaacacatgctcggattggtaaaacgattcagcactgtatcgaggtactggattatcaaaaaaatcgatatatacaagctgaaaaagccagtgcttaa

SEQ ID NO: 155 - DNA, 1413 bp, Rhodococcus jostii RHA1
atgatcggatcgagagcacgacgacgtcgaatgctgctggtgggagcgatggtggtgggcgcacagctcgccgtcgccgcgccgtcggtcggggctcccgccgacgacggaacgccggtggacgtgcagccggctactaccgtccccgcctggcccgaggccgaccgggggttctacgaaccaccggcggacgtggtcgcggcggccgagccgggcgaaatcatcgccgcccgcgaagtgcacctggcgaacctgtcggtgcttccggtgaacgtcgacgcgtggcagctgtcgtatcgctccaccaactcgcgggacgagccgatcccggcggtcgcgacggtcgtcaagccgcggggcacgatcgacggcgtccgcaatctgctctcgctccagccggaggaagactccctcggcaagtactgcgccgcttcgtacgcactgcagcagtggtccgtgcccgcgccgctgaccggtcagatcgtcgcgccgctgcagttcctcgaggcgcaggccgccctcgcccagggatgggccgtcgtgatgccggatcaccagggcccgaacgccgcgtatgcggccgggcccctcgcgggccgcatcaccctggacgggatccgggcggcggagaacttcggcccactgggcctgacaggcaggcagactccggtcgggttgatgggctattccggaggcgcgatcgcgacgggtcacgccgccgaactccacgcgagctacgcaccggacctgaacatcgtcggtgcggccgaaggcggcatcccggccgatctcggcgccctcgtcgatctcgccgacaacaacctgggcgcgggaatcgtgctgggcggcgtgttcggcgtgagccgtgattatcccgagctcgcggagtatctcgacacacatctgaatccactcggcaagcagctcctgaccgccaagagcaacctctgcgtgagctaccagtcggcgctcctgccgttcgcgaacctgcggggcctgttcgacagcccgagcggtgacccgctgcgcgatccggtggtcgagtcggtactcgaccggacgaagatgggtcaccgggtcccggacgtcccgatgttcatgtaccaggcgaacccggactggctggtgccggtcgggcccgtcgacacactcgtcgacacctactgccaggacccggacgcccgggtgacctacacccgcgaccacgccagcgagcacctgtccctcgaaccggtcgcggcggcgagcgccctgatgtggctgcgggaccggttcgccggggtcccggccgagaccggatgcagcacccacgacgtcggatcgatggccctcgaccaggcgacgtggccggtgtggtcgtcgatcgtcggcgacacgatcacgagcctgctcggtcagccgatcggcacgtga

SEQ ID NO: 156 - DNA, 990 bp, Rhodococcus sp.
atgagcactgcgacttacgaattctgcccgtcacccctcccggtgacgcggcgggagttcgccggagccagcctgcagtcgacggccctcgcccacacactccgacgcacggtccggccgttcctggacgggtgggcgcgctaccccgaactgccgtggcccacgggagtcgtcgacctgttcgggtactcgctcggtcccatccgcggaaccgtgcgcaggcccatccggctgccgcactgccgcgccgaatggatccggccgccgggtgagctcggcgaccgggcgatcctctacctccacggcggggcgttcctgtgctgcgggatcaactcccaccgccagatggtgtcccggatctcggcggagtcgcaggcgtcgacgctgaacgtcgcgtaccggatgatcccgcggaatcccatccgggcggccgtcgaggacggtgtcgacgggtaccggtggctgctctcgcacggctacaccgcagaccggatcgtcatcgccggcgactcggcgggcgggttcctgacgttcatggtgacgctcgaagcgctgcgccaggggttgccgcgtcccgccgccgacgtcgcgctgtcgccgctgaccgacctcgatccggtgaacaagctggcccatcccaacgccgacctctgcgctgtcttccccaaacgcgcggtcggtgccctgtccaggctgatcgaaaggctggacaccaggggcgggcacgagccgtccacgtcacccgtggacggctccctcgccgccatgccgccggcgctgatccagaccggctcgcaggaaatggtctacgtcgacgcggaactgatgtccgagcggctgtcccaggcgggtgtgccgtgcgaactgcaggtgtgggaacggcaggtgcacgtcttccaggccgccgccggactgctccccgagggcacccgcgccatccgcgagatcggccggttcatccgcaaggccacacccgtgagtacttcttaa

SEQ ID NO: 157 - protein, 386 aa, Acinetobacter sp ADP1
MAFRFIEGIPTSLGVFGVVGSLCMSHAHAIEAVQTSATITPTSPAACIGLESNSDRLACYDALFKVADTAKTTPVIEQKAALNPSPSVEQSELNPQSIKEKIGNLFAIEGPRIDPNTSLLDRRWELSEKSKLGTWNIRGYKPVYLLPIFWTSKKNEFPSSPNPENTVHENQNLTSAESKFQLSLKTKAWENIFGNNGDLWLGYTQSSRWQVYNADESRPFRETNYEPEASLIFRTNYEFLGLNGRLLGVTLNHQSNGRSDPLSRSWNRVIFNIGLERDNFALVLRPWIRIQEEAKNDNNPDIEDYVGRGDLTAFYRWKDNDFSLMLRHSLKDGDKSHGAVQFDWAFPISGKLRGNFQLFNGYGESLIDYNHRATYVGLGVSLMNWY

SEQ ID NO: 158 - protein, 289 aa, Escherichia coli
MRTLQGWLLPVFMLPMAVYAQEATVKEVHDAPAVRGSIIANMLQEHDNPFTLYPYDTNYLIYTQTSDLNKEAIASYDWAENARKDEVKFQLSLAFPLWRGILGPNSVLGASYTQKSWWQLSNSEESSPFRETNYEPQLFLGFATDYRFAGWTLRDVEMGYNHDSNGRSDPTSRSWNRLYTRLMAENGNWLVEVKPWYVVGNTDDNPDITKYMGYYQLKIGYHLGDAVLSAKGQYNWNTGYGGAELGLSYPITKHVRLYTQVYSGYGESLIDYNFNQTRVGVGVMLNDLF

SEQ ID NO: 159 - protein, 395 aa, Streptomyces coelicolor A3(2)
MTVVEPTPGADRVSIQRLRRRLERLIGVAATEGNELVALRNGDEIFPAMLGAIRAAEHTIDMMTFVYWRGQIARDFAAALADRARSGVRVRLLLDGFGAKEIEQDLLDAMEAAGVQIAWFRKPLWLSPFKQNHRCHRKALVIDEHTAFTGGVGIAEEWCGDARGPGEWRDTHVQVRGPAVDGVAAAFAQNWAECHDELYDDRDRFSDHTQPGTSIVQVVRGSASFGWQDMQTLIRVMLTSAEHRFRLATAYFAPDTYFIDLLCATARRGVTVEILLPGPHTDQRACQLAGQYHYTRLLDAGVSIREYQPTMMHAKIITVDGLAALIGSTNFNRRSMDHDEEIMLAVLDQEFTNGLDRDFDADLERSTAIEPTRWKRRATLRRLRETAVLPLRRFL

SEQ ID NO: 160 - protein, 148 aa, Arabidopsis thaliana
MAAPIILFSFLLFFSVSVSALNVGVQLIHPSISLTKECSRKCESEFCSVPPFLRYGKYCGLLYSGCPGERPCDGLDSCCMKHDACVQSKNNDYLSQECSQKFINCMNNFSQKKQPTFKGNKCDADEVIDVISIVMEAALIAGKVLKKP

SEQ ID NO: 161 - protein, 357 aa, Arabidopsis thaliana
MEYQGLQNWDGLLDPLDDNLRREILRYGQFVESAYQAFDFDPSSPTYGTCRFPRSTLLERSGLPNSGYRLTKNLRATSGINLPRWIEKAPSWMATQSSWIGYVAVCQDKEEISRLGRRDVVISFRGTATCLEWLENLRATLTHLPNGPTGANLNGSNSGPMVESGFLSLYTSGVHSLRDMVREEIARLLQSYGDEPLSVTITGHSLGAAIATLAAYDIKTTFKRAPMVTVISFGGPRVGNRCFRKLLEKQGTKVLRIVNSDDVITKVPGVVLENREQDNVKMTASIMPSWIQRRVEETPWVYAEIGKELRLSSRDSPHLSSINVATCHELKTYLHLVDGFVSSTCPFRETARRVLHR

SEQ ID NO: 162 - protein, 471 aa, Arabidopsis thaliana
MAAKVFTQNPIYSQSLVRDKTPQQKHNLDHFSISQHTSKRLVVSSSTMSPPISSSPLSLPSSSSSQAIPPSRAPAVTLPLSRVWREIQGSNNWENLIEPLSPILQQEITRYGNLLSASYKGFDLNPNSKRYLSCKYGKKNLLKESGIHDPDGYQVTKYIYATPDINLNPIKNEPNRARWIGYVAVSSDESVKRLGRRDILVTFRGTVTNHEWLANLKSSLTPARLDPHNPRPDVKVESGFLGLYTSGESESKFGLESCREQLLSEISRLMNKHKGEEISITLAGHSMGSSLAQLLAYDIAELGMNQRRDEKPVPVTVFSFAGPRVGNLGFKKRCEELGVKVLRITNVNDPITKLPGFLFNENFRSLGGVYELPWSCSCYTHVGVELTLDFFDVQNISCVHDLETYITLVNRPRCSKLAVNEDNFGGEFLNRTSELMFSKGRRQALHFTNAATNAAYLLCSISNHMLYYNIF

SEQ ID NO: 163 - protein, 410 aa, Arabidopsis thaliana
SPSKKNKPPSCGSLVTILSLDGGGVRGIIAGVILAFLEKQLQELDGEEARLADYFDVIAGTSTGGLVTAMLTVPDETGRPHFAAKDIVPFYLEHCPKIFPQPTGVLALLPKLPKLLSGPKYSGKYLRNLLSKLLGETRLHQTLTNIVIPTFDIKKLQPTIFSSYQLLVDPSLDVKVSDICIGTSAAPTFFPPHYFSNEDSQGNKTEFNLVDGAVTANNPTLVAMTAVSKQIVKNNPDMGKLKPLGFDRFLVISIGTGSTKREEKYSAKKAAKWGIISWLYDDGSTPILDITMESSRDMIHYHSSVVFKALQSEDKYLRIDDDTLEGDVSTMDLATKSNLENLQKIGEKMLTNRVMQMNIDTGVYEPVAENITNDEQLKRYAKILSDERKLRRLRSDTMIKDSSNESQEIK

SEQ ID NO: 164 - protein, 686 aa, Anabaena variabilis ATCC 29413
MINLANTQTVLKFDGIDDYIDFGKNDIGGVFAQGSSCFTVSGWINPHKLTEKSTSYGTRNVFFARSSDRYSDNFEFGISETGSLDIFIDETISKGIRTFGNGELTIGQWHFFAIVFNSGQITVYLDDHEYNDSLRGSSLNKATSSVTLGATLHKQVYFTGQLANISVWNYPCTQVQIKTHHCGLIVGDEPGLVAYWKLDEGQGTTVKNKAGKSYQGNFRGNPSWDLAQIPFAAPLSSQDDIQEDVQFEIGIIAETSISTLTTDLLAATVPLVSNNEDQTIEIQYPEINSEKSEIIANLINLPSHEEASKTDQTEVLVNSQQLQTFIQAESPETMNTKSRPRYKILSIDGGGIRGIIPALLLAEIERRTQEPIFSLFDLIAGTSSGGILALGLTKPRLNSSEELPLAEYTAEDLVQLFLEYGVEIFYEPLFERLLGPLEDIFLQPKYPSTSKEEILRQYLGKTPLVNNLKEVFVTSYDIEQRIPVFFTNQLEKQQIESKNSHNLCGNVSLLDAALATSATPTYFAPHRIVSPENSAIAYTLIDGGVFANNPAHLAILEAQISSKRKAQTVLNQEDILVVSLGTGSPTSAYPYKEVKNWGLLQWGRPLLNIVFDGGSGVVSGELEQLFEPSDKEAKSFYYRFQTLLDAELEAIDNTKLQNTRQLQAIAHKLISEKSQQIDELCELLLG

SEQ ID NO: 165 - protein, 664 aa, Saccharomyces cerevisiae S288c
MKLQSLLVSAAVLTSLTENVNAWSPNNSYVPANVTCDDDINLVREASGLSDNETEWLKKRDAYTKEALHSFLNRATSNFSDTSLLSTLFGSNSSNMPKIAVACSGGGYRAMLSGAGMLAAMDNRTDGANEHGLGGLLQGATYLAGLSGGNWLTSTLAWNNWTSVQAIVDNTTESNSIWDISHSILTPDGINIFKTGSRWDDISDDVQDKKDAGFNISLADVWGRALAYNFWPSLHRGGVGYTWSTLREADVFKNGEMPFPITVADGRYPGTTVINLNATLFEFNPFEMGSWDPTLNAFTDVKYLGTNVTNGKPVNKGQCIAGFDNTGFITATSSTLFNQFLLRLNSTDLPSFIANLATDFLEDLSDNSDDIAIYAPNPFKEANFLQKNATSSIIESEYLFLVDGGEDNQNIPLVPLLQKERELDVIFALDNSADTDDYWPDGASLVNTYQRQFGSQGLNLSFPYVPDVNTFVNLGLNKKPTFFGCDARNLTDLEYIPPLIVYIPNSRHSFNGNQSTFKMSYSDSERLGMIKNGFEAATMGNFTDDSDFLGCVGCAIIRRKQQNLNATLPSECSQCFTNYCWNGTIDSRSVSGVGNDDYSSSASLSASAAAASASASASASASASASGSSTHKKNAGNALVNYSNLNTNTFIGVLSVISAVFGLI

SEQ ID NO: 166 - protein, 706 aa, Saccharomyces cerevisiae S288c
MQLRNILQASSLISGLSLAADSSSTTGDGYAPSIIPCPSDDTSLVRNASGLSTAETDWLKKRDAYTKEALHSFLSRATSNFSDTSLLSTLFSSNSSNVPKIGIACSGGGYRAMLGGAGMIAAMDNRTDGANEHGLGGLLQSSTYLSGLSGGNWLTGTLAWNNWTSVQEIVDHMSESDSIWNITKSIVNPGGSNLTYTIERWESIVQEVQAKSDAGFNISLSDLWARALSYNFFPSLPDAGSALTWSSLRDVDVFKNGEMPLPITVADGRYPGTTVINLNATLFEFTPFEMGSWDPSLNAFTDVKYLGTNVTNGKPVNKDQCVSGYDNAGFVIATSASLFNEFSLEASTSTYYKMINSFANKYVNNLSQDDDDIAIYAANPFKDTEFVDRNYTSSIVDADDLFLVDGGEDGQNLPLVPLIKKERDLDVVFALDISDNTDESWPSGVCMTNTYERQYSKQGKGMAFPYVPDVNTFLNLGLTNKPTFFGCDAKNLTDLEYIPPLVVYIPNTKHSFNGNQSTLKMNYNVTERLGMIRNGFEAATMGNFTDDSNFLGCIGCAIIRRKQESLNATLPPECTKCFADYCWNGTLSTSANPELSGNSTYQSGAIASAISEATDGIPITALLGSSTSGNTTSNSTTSTSSNVTSNSNSSSNTTLNSNSSSSSISSSTARSSSSTANKANAAAISYANTNTLMSLLGAITALFGLI

SEQ ID NO: 167 - protein, 211 aa, Acinetobacter sp. ADP1
MQLYNMFLDGKWAKWFLIGSFSVIPFTVSAKTILILGDSLSAGYGINPEQGWVALLQKRLDQQFPKQHKVINASVSGETTSGALARLPKLLTTYRPNVVVIELGGNDALRGQPPQMIQSNLEKLIQHSQKAKSKVVVFGMKIPPNYGTAYSQAFENNYKVVSQTYQVKLLPFFLDGVAGHKSLMQNDQIHPNAKAQSILLNNAYPYIKGAL

SEQ ID NO: 168 - protein, 342 aa, Acinetobacter sp. ADP1
MSDIPFLNPTILQQLDLPVPSRDQTPLVLPQLNLNHSFEPSRDLLAYRKLYGLDLLAGDYWQGYIQMPLFRLHVQVFTPEREIPLGTVCLLHGYLEHSGIYQPIIREILDQGFSVVTYDLPGHGLSDGSPANIQNFDHYQQVLMAVYQYVKNADQLPKPWLGIGQSTGGAIWMHHLLEYAEKRQDPIVDRVLLLSPLIRPAKTAWWHNSVGLGIIRRIRRQVPRHFRRNNHNPEFLRFIRLKDPLQPRMMGMDWILAMSKWMFEMEQRPACRIPVWLAQGALDQTVDWRYNIEFIRRKFRLQTLLMLEEGSHQLINERADIRAALTGLIPAFLHARPKHHYY

SEQ ID NO: 169 - protein, 279 aa, Rhodococcus jostii RHA1
MQHRESSFAGVGGIPIVYDVWLPERRPRGVLVLCHGFGEHARRYDHVIERLGELDLAIYAPDHRGHGRSGGKRVHLKDWTEFTDDLHQLFGIASTDWPGTDRFLLGHSMGGSIALTYALDHQQDLKALMLSGPAVDVTSGTPRIVVEIGKLVGRFLPGVPVESLDAKLVSRDPAVVSAYEEDPLVHHGKVPAGIARGMILAAERLPERLPSLTIPLLLQHGQDDGLASVHGTELIAEYVGSEDLTVEIYENLFHEVFNEPENEEVLDDLVEWLRPRVQA

SEQ ID NO: 170 - protein, 825 aa, Arabidopsis thaliana
MDISNEASVDPFSIGPSSIMGRTIAFRVLFCRSMSQLRRDLFRFLLHWFLRFKLTVSPFVSWFHPRNPQGILAVVTIIAFVLKRYTNVKIKAEMAYRRKFWRNMMRTALTYEEWAHAAKMLEKETPKMNESDLYDEELVKNKLQELRHRRQEGSLRDIMFCMRADLVRNLGNMCNSELHKGRLQVPRHIKEYIDEVSTQLRMVCNSDSEELSLEEKLSFMHETRHAFGRTALLLSGGASLGAFHVGVVRTLVEHKLLPRIIAGSSVGSIICAVVASRSWPELQSFFENSLHSLQFFDQLGGVFSIVKRVMTQGALHDIRQLQCMLRNLTSNLTFQEAYDMTGRILGITVCSPRKHEPPRCLNYLTSPHVVIWSAVTASCAFPGLFEAQELMAKDRSGEIVPYHPPFNLDPEVGTKSSSGRRWRDGSLEVDLPMMQLKELFNVNHFIVSQANPHIAPLLRLKDLVRAYGGRFAAKLAHLVEMEVKHRCNQVLELGFPLGGLAKLFAQEWEGDVTVVMPATLAQYSKIIQNPTHVELQKAANQGRRCTWEKLSAIKSNCGIELALDDSVAILNHMRRLKKSAERAATATSSSHHGLASTTRFNASRRIPSWNVLARENSTGSLDDLVTDNNLHASSGRNLSDSETESVELSSWTRTGGPLMRTASANKFIDFVQSLDIDIALVRGFSSSPNSPAVPPGGSFTPSPRSIAAHSDIESNSNSNNLGTSTSSITVTEGDLLQPERTSNGFVLNVVKRENLGMPSIGNQNTELPESVQLDIPEKEMDCSSVSEHEEDDNDNEEEHNGSSLVTVSSEDSGLQEPVSGSVIDA

SEQ ID NO: 171 - protein, 501 aa, Acinetobacter sp. ADP1
MLGIKKSDMNPYQAHRIKKLKYQLENAESYEEWKSTALQLDEETGLQEWKYDNCSAYFDAELISYRLNLLRKYRLQQRVMDSVYLLQEGLTHDIANIGHPMLFAATYVGTKQIIEDYIEEVSLSLAFIAASQCQTLTVAEKLKFFKNCQKTYGQPALMFSGGATLGLFHSGVCKTLIQQDLMPRVLSGSSAGAIMAGMLGTSTASEFQKILLGENFFSEAFHFRGVRDLLKGNGGFADVKYLKKFLIENLGDLTFSEAYERSGLHINVAVAPYDGSQNARILNAYTAPNLLVWSAVLASCAVPVLFPPVRLTSKKRDGSHTPYMANTKWVDGSVRSDFPQEKMARLYNLNYTIASQVNPHVVPFMQSDASRYRKDILSWPQRILRRQGKVISLGIMDFTRERLGNVPPVRRLLDHGYGIVGQRYYGDVNIIAPFNLRQYAYMLQNPRPHLFKLLQQQGERATWPKISAIETHARIGKTIQHCIEVLDYQKNRYIQAEKASA

SEQ ID NO: 172 - protein, 910 aa, Saccharomyces cerevisiae S288c
MSSKISDLTSTQNKPLLVTQQLIEKYYEQILGTSQNIIPILNPKNKFIRPSKDNSDVERVEEDAGKRLQTGKNKTTNKVNFNLDTGNEDKLDDDQETVTENENNDIEMVETDEGEDERQGSSLASKCKSFLYNVFVGNYERDILIDKVCSQKQHAMSFEEWCSAGARLDDLTGKTEWKQKLESPLYDYKLIKDLTSRMREERLNRNYAQLLYIIRTNWVRNLGNMGNVNLYRHSHVGTKYLIDEYMMESRLALESLMESDLDDSYLLGILQQTRRNIGRTALVLSGGGTFGLFHIGVLGTLFELDLLPRVISGSSAGAIVASILSVHHKEEIPVLLNHILDKEFNIFKDDKQKSESENLLIKISRFFKNGTWFDNKHLVNTMIEFLGDLTFREAYNRTGKILNITVSPASLFEQPRLLNNLTAPNVLIWSAVCASCSLPGIFPSSPLYEKDPKTGERKPWTGSSSVKFVDGSVDNDLPISRLSEMFNVDHIIACQVNIHVFPFLKLSLSCVGGEIEDEFSARLKQNLSSIYNFMANEAIHILEIGSEMGIAKNALTKLRSVLSQQYSGDITILPDMCMLFRIKELLSNPTKEFLLREITNGAKATWPKVSIIQNHCGQEFALDKAISYIKGRMIVTSSLKTPFQFADSVIGLIKAPEQTSDESKNPENSTLLTRTPTKGDNHISNVLDDNLLESESTNSLLLLRENASTYGRSPSGFRPRYSITSASLNPRHQRRKSDTISTSRRPAKSFSFSVASPTSRMLRQSSKINGHPPPILQKKTSMGRLMFPMDAKTYDPESHELIPHSASIETPAMVDKKLHFGRKSRYLRHMNKKWVSSSNILYTDSDKEDHPTLRLISNFDSDAMIHSDLAGNFRRHSIDGRPPSQATKSSPFRSRPSSSTQHKSTTSFTQ

SEQ ID NO: 173 - protein, 470 aa, Rhodococcus jostii RHA1
MIGSRARRRRMLLVGAMVVGAQLAVAAPSVGAPADDGTPVDVQPATTVPAWPEADRGFYEPPADVVAAAEPGEIIAAREVHLANLSVLPVNVDAWQLSYRSTNSRDEPIPAVATVVKPRGTIDGVRNLLSLQPEEDSLGKYCAASYALQQWSVPAPLTGQIVAPLQFLEAQAALAQGWAVVMPDHQGPNAAYAAGPLAGRITLDGIRAAENFGPLGLTGRQTPVGLMGYSGGAIATGHAAELHASYAPDLNIVGAAEGGIPADLGALVDLADNNLGAGIVLGGVFGVSRDYPELAEYLDTHLNPLGKQLLTAKSNLCVSYQSALLPFANLRGLFDSPSGDPLRDPVVESVLDRTKMGHRVPDVPMFMYQANPDWLVPVGPVDTLVDTYCQDPDARVTYTRDHASEHLSLEPVAAASALMWLRDRFAGVPAETGCSTHDVGSMALDQATWPVWSSIVGDTITSLLGQPIGT

SEQ ID NO: 174 - protein, 329 aa, Rhodococcus sp.
MSTATYEFCPSPLPVTRREFAGASLQSTALAHTLRRTVRPFLDGWARYPELPWPTGVVDLFGYSLGPIRGTVRRPIRLPHCRAEWIRPPGELGDRAILYLHGGAFLCCGINSHRQMVSRISAESQASTLNVAYRMIPRNPIRAAVEDGVDGYRWLLSHGYTADRIVIAGDSAGGFLTFMVTLEALRQGLPRPAADVALSPLTDLDPVNKLAHPNADLCAVFPKRAVGALSRLIERLDTRGGHEPSTSPVDGSLAAMPPALIQTGSQEMVYVDAELMSERLSQAGVPCELQVWERQVHVFQAAAGLLPEGTRAIREIGRFIRKATPVSTS

SEQ ID NO: 175 - DNA, 2733 bp, Saccharomyces cerevisiae S288c
atgagcagcaaaatatcagatcttacatctacacaaaataagcccctccttgttacgcaacaactaatcgaaaaatattacgaacagatcctgggcacttcccagaacataattcctattttaaatccgaagaacaagtttattaggcccagtaaggataattcagatgttgaaagggtggaggaggatgctggtaaaagactgcaaactggcaagaacaaaactacgaacaaagtaaatttcaacctggatactggaaacgaggataaacttgacgatgaccaagagacagtaacagaaaatgaaaataatgatatcgagatggttgagacagacgaaggcgaagatgaaaggcaagggtcatctttagccagtaaatgcaaatcatttctttacaacgtttttgtgggaaactatgaaagagacattcttattgacaaagtctgttcacaaaagcaacatgcgatgtcatttgaagaatggtgttctgcgggcgccagattggatgacctcactgggaaaacagaatggaagcagaaattggaaagtcccttgtatgattacaagctaataaaagatttaacatctagaatgcgtgaggagcgcttgaataggaattacgctcaattgttgtacatcattaggacgaattgggtacgaaacctgggaaatatggggaatgtaaacctatataggcactcccatgtaggcaccaaatatttaattgacgagtatatgatggagtctaggttagcgctagaatctttaatggagtctgatcttgatgatagttaccttttgggtatactgcaacaaacgagaagaaatattggtcgtaccgctttagttctcagtgggggtggaacttttggtcttttccacatcggtgtccttggtactctatttgaattggatttattacccagagtgattagtggtagcagtgctggtgcaattgtagcaagcatattatctgtccatcacaaagaagaaattccggttttactaaatcatattttggataaagaattcaacattttcaaagacgataaacagaaaagtgaaagcgagaatttgttaataaaaatatctaggttcttcaaaaacggtacgtggtttgataacaagcatctggtaaatacaatgatagaatttttgggagatttgacatttagggaagcttacaatagaacgggtaaaattttgaatataaccgtttcgccggcatctttatttgaacaaccgcgcttgctgaataatttgactgcaccaaacgtcctgatttggtccgccgtatgtgcatcatgttcactaccgggaattttcccctcgagcccactttacgaaaaagatccaaaaacgggagaaaggaaaccatggactggtagtagttcggtcaaatttgtcgatggttctgtggacaatgacttgcccatttctcgtctttctgaaatgtttaatgtagaccatattatcgcatgccaggtgaatattcacgtatttccctttttgaaactatcactatcctgtgttggcggggaaattgaggacgaatttagtgcaagattaaagcaaaacttatcaagtatatacaattttatggccaatgaagctattcatattctagaaattggaagtgagatgggaattgccaaaaacgcgcttacaaaactgagatcggtattatctcaacaatattctggtgacatcactattttgcccgacatgtgtatgctttttagaataaaggagctgttgtcaaacccaacaaaagaatttttattaagggaaatcaccaatggtgcaaaagctacgtggcccaaggtttccattattcaaaatcactgtggccaggaatttgctctggataaggcgatttcttatatcaaaggtaggatgattgtcacctcctctttaaaaacccccttccaatttgctgattcagtcattggattaattaaagctccagagcaaacgtcagatgagtccaaaaacccagaaaattcaacattgctaactaggactccaaccaagggtgacaatcatatttccaatgttttagatgacaacttattagaatcagaatcgacaaactctttgctattgttacgtgagaatgcaagcacatatgggcggtcaccttccgggtttagaccgcggtattccattacgtccgcttctctcaatccgcgtcaccaaagaaggaaatcagatactatttcaacttcaaggcgaccagccaaatccttttcattttcagttgcttctcccacatcaaggatgttgaggcaatccagcaaaatcaatggacacccaccgccaattctgcagaaaaaaacaagtatgggccggctaatgtttcctatggatgccaagacctatgacccggaaagccatgaacttatcccacattctgccagcattgaaacacctgccatggtagacaagaaattgcattttggccgaaagagtagatacttgaggcatatgaacaaaaaatgggtcagcagtagcaacatattatacacagattcggataaagaagaccatcctacattgagactgataagtaacttcgattcagacgcaatgattcatagtgatttagcgggcaatttcaggcgtcatagcattgatggaagacccccttctcaagctacaaagagctcaccgtttcgatcgaggccttcttcttcaacgcagcacaaaagcaccaccagttttactcaataa

SEQ ID NO: 176 - protein, 401 aa, Bacillus subtilis subtilis 168
MLRGTYLFGYAFFFTVGIIHISTGSLTPFLLEAFNKTTDDISVIIFFQFTGFLSGVLIAPLMIKKYSHFRTLTLALTIMLVALSIFFLTKDWYYIIVMAFLLGYGAGTLETTVGSFVIANFESNAEKMSKLEVLFGLGALSFPLLINSFIDINNWFLPYYCIFTFLFVLFVGWLIFLSKNREYAKNANQQVTFPDGGAFQYFIGDRKKSKQLGFFVFFAFLYAGIETNFANFLPSIMINQDNEQISLISVSFFWVGIIIGRILIGFVSRRLDFSKYLLFSCSCLIVLLIAFSYISNPILQLSGTFLIGLSIAGIFPIALTLASIIIQKYVDEVTSLFIASASFGGAIISFLIGWSLNQDTILLTMGIFTTMAVILVGISVKIRRTKTEDPISLENKASKTQ

SEQ ID NO: 177 - protein, 472 aa, Streptomyces coelicolor
MASTSQAPSPGAGTAHPDHLGHVIFIAAAAAMGGFLFGYDSSVINGAVEAIRDRYDVGSAVLAQVIAVALIGCAIGAATAGRIADRIGRIRCMQIAAVLFTVSAVGSALPFALWDLAMWRIIGGFAIGMASVIGPAYIAEVSPPAYRGRLGSFQQAAIVIGIAVSQLVNWGLLNAAGGDQRGELMGLEAWQVMLGVMVIPAVLYGLLSFAIPESPRFLISVGKRERAKKILEEVEGKDVDFDARVTEIEHAMHREEKSSFKDLLGGSFFFKPIVWIGIGLSVFQQFVGINVAFYYSSTLWQSVGVDPADSFFYSFTTSIINIVGTVIAMIFVDRVGRKPLALIGSVGMVIGLALEAWAFSFDLVDGKLPATQGWVALIAAHVFVLFFALSWGVVVWVFLGEMFPNRIRAAALGVAASAQWIANWAITASFPSLADWNLSGTYVIYTIFAALSIPFVLKFVKETKGKALEEMG

SEQ ID NO: 178 - protein, 472 aa, Streptomyces coelicolor A3; identical to SEQ ID NO: 177

SEQ ID NO: 179 - protein, 498 aa, Mycobacterium smegmatis  MC2 155
MNVIGITLLPRGRIMSHGPVSDDTPSIFGDDDQAASSGRTAVRIAAVAALGGLLFGYDSAVINGAVDSIQEDFGIGNYALGLAVASALLGAAAGALSAGRIADRIGRIAVMKIAAVLFFISAFGTGFAPETVTLVVFRIVGGIGVGVASVIAPAYIAETSPPGIRGRLGSLQQLAIVLGIFTSFVVNWLLQWAAGGPNEVLAMGLDAWRWMFLAMAVPAVLYGALAFTIPESPRYLVATHKIPEARRVLSMLLGQKNLEITITRIRDTLEREDKPSWRDLKKPTGGIYGIVWVGLGLSIFQQFVGINVIFYYSNVLWQAVGFSADQSAIYTVITSVVNVLTTLIAIALIDKIGRKPLLLIGSSGMAVTLATMAVIFANATVKPDGTPDLPGASGLIALIAANLFVVAFGMSWGPVVWVLLGEMFPNRFRAAALGLAAAGQWAANWLITVSFPELRNHLGLAYGFYALCAVLSFLFVSKWVEETRGKNLEDMHAEALGH

SEQ ID NO: 180 - DNA, 1647 bp, Lactococcus lactis
atgtatacagtaggagattacctattagaccgattacacgagttaggaattgaagaaatttttggagtccctggagactataacttacaatttttagatcaaattatttcccgcaaggatatgaaatgggtcggaaatgctaatgaattaaatgcttcttatatggctgatggctatgctcgtactaaaaaagctgccgcatttcttacaacctttggagtaggtgaattgagtgcagttaatggattagcaggaagttacgccgaaaatttaccagtagtagaaatagtgggatcacctacatcaaaagtccaaaatgaaggaaaatttgttcatcatacgctggctgacggtgattttaaacactttatgaaaatgcacgaacctgttacagcagctcgaactttactgacagcagaaaatgcaaccgttgaaattgaccgagtactttctgcactactaaaagaaagaaaacctgtctatatcaacttaccagttgatgttgctgctgcaaaagcagagaaaccctcactccctttgaaaaaagaaaatccaacttcaaatacaagtgaccaagagattttgaataaaattcaagaaagcttgaaaaatgccaaaaaaccaatcgtgattacaggacatgaaataattagctttggcttagaaaatacagtcactcaatttatttcaaagacaaaactccctattacgacattaaactttggaaaaagttcagttgatgaaactctcccttcatttttaggaatctataatggtaaactctcagagcctaatcttaaagaattcgtggaatcagccgacttcatcctgatgcttggagttaaactcacagactcttcaacaggagcatttacccatcatttaaatgaaaataaaatgatttcactgaacatagacgaaggaaaaatatttaacgaaagcatccaaaattttgattttgaatccctcatctcctctctcttagacctaagcggaatagaatacaaaggaaaatatatcgataaaaagcaagaagactttgttccatcaaatgcgcttttatcacaagaccgcctatggcaagcagttgaaaacctaactcaaagcaatgaaacaatcgttgctgaacaagggacatcattctttggcgcttcatcaattttcttaaaaccaaagagtcattttattggtcaacccttatggggatcaattggatatacattcccagcagcattaggaagccaaattgcagataaagaaagcagacaccttttatttattggtgatggttcacttcaacttacagtgcaagaattaggattagcaatcagagaaaaaattaatccaatttgctttattatcaataatgatggttatacagtcgaaagagaaattcatggaccaaatcaaagctacaatgatattccaatgtggaattactcaaaattaccagaatcatttggagcaacagaagaacgagtagtctcgaaaatcgttagaactgaaaatgaatttgtgtctgtcatgaaagaagctcaagcagatccaaatagaatgtactggattgagttagttttggcaaaagaagatgcaccaaaagtactgaaaaaaatgggtaaactatttgctgaacaaaataaatcataa

SEQ ID NO: 181 - protein, 548 aa, Lactococcus lactis
MYTVGDYLLDRLHELGIEEIFGVPGDYNLQFLDQIISRKDMKWVGNANELNASYMADGYARTKKAAAFLTTFGVGELSAVNGLAGSYAENLPVVEIVGSPTSKVQNEGKFVHHTLADGDFKHFMKMHEPVTAARTLLTAENATVEIDRVLSALLKERKPVYINLPVDVAAAKAEKPSLPLKKENPTSNTSDQEILNKIQESLKNAKKPIVITGHEIISFGLENTVTQFISKTKLPITTLNFGKSSVDETLPSFLGIYNGKLSEPNLKEFVESADFILMLGVKLTDSSTGAFTHHLNENKMISLNIDEGKIFNESIQNFDFESLISSLLDLSGIEYKGKYIDKKQEDFVPSNALLSQDRLWQAVENLTQSNETIVAEQGTSFFGASSIFLKPKSHFIGQPLWGSIGYTFPAALGSQIADKESRHLLFIGDGSLQLTVQELGLAIREKINPICFIINNDGYTVEREIHGPNQSYNDIPMWNYSKLPESFGATEERVVSKIVRTENEFVSVMKEAQADPNRMYWIELVLAKEDAPKVLKKMGKLFAEQNKS

SEQ ID NO: 182 - DNA, 1164 bp, Escherichia coli
atgaacaactttaatctgcacaccccaacccgcattctgtttggtaaaggcgcaatcgctggtttacgcgaacaaattcctcacgatgctcgcgtattgattacctacggcggcggcagcgtgaaaaaaaccggcgttctcgatcaagttctggatgccctgaaaggcatggacgtgctggaatttggcggtattgagccaaacccggcttatgaaacgctgatgaacgccgtgaaactggttcgcgaacagaaagtgactttcctgctggcggttggcggcggttctgtactggacggcaccaaatttatcgccgcagcggctaactatccggaaaatatcgatccgtggcacattctgcaaacgggcggtaaagagattaaaagcgccatcccgatgggctgtgtgctgacgctgccagcaaccggttcagaatccaacgcaggcgcggtgatctcccgtaaaaccacaggcgacaagcaggcgttccattctgcccatgttcagccggtatttgccgtgctcgatccggtttatacctacaccctgccgccgcgtcaggtggctaacggcgtagtggacgcctttgtacacaccgtggaacagtatgttaccaaaccggttgatgccaaaattcaggaccgtttcgcagaaggcattttgctgacgctaatcgaagatggtccgaaagccctgaaagagccagaaaactacgatgtgcgcgccaacgtcatgtgggcggcgactcaggcgctgaacggtttgattggcgctggcgtaccgcaggactgggcaacgcatatgctgggccacgaactgactgcgatgcacggtctggatcacgcgcaaacactggctatcgtcctgcctgcactgtggaatgaaaaacgcgataccaagcgcgctaagctgctgcaatatgctgaacgcgtctggaacatcactgaaggttccgatgatgagcgtattgacgccgcgattgccgcaacccgcaatttctttgagcaattaggcgtgcctacccacctctccgactacggtctggacggcagctccatcccggctttgctgaaaaaactggaagagcacggcatgacccaactgggcgaaaatcatgacattacgttggatgtcagccgccgtatatacgaagccgcccgctaa

SEQ ID NO: 183 - protein, 387 aa, Escherichia coli
MNNFNLHTPTRILFGKGAIAGLREQIPHDARVLITYGGGSVKKTGVLDQVLDALKGMDVLEFGGIEPNPAYETLMNAVKLVREQKVTFLLAVGGGSVLDGTKFIAAAANYPENIDPWHILQTGGKEIKSAIPMGCVLTLPATGSESNAGAVISRKTTGDKQAFHSAHVQPVFAVLDPVYTYTLPPRQVANGVVDAFVHTVEQYVTKPVDAKIQDRFAEGILLTLIEDGPKALKEPENYDVRANVMWAATQALNGLIGAGVPQDWATHMLGHELTAMHGLDHAQTLAIVLPALWNEKRDTKRAKLLQYAERVWNITEGSDDERIDAAIAATRNFFEQLGVPTHLSDYGLDGSSIPALLKKLEEHGMTQLGENHDITLDVSRRIYEAAR

SEQ ID NO: 184 - protein, 172 aa, Synechococcus elongatus PCC7942
MKRTLSVLVEDEAGVLTRIAGLFARRSFNIESLAVGPAEQVGISRITMVVQGDDREIEQITKQLYKLINVLKVQDISEVPCVERELMLIKVNANSSNRSEILELVQIFRARVVDVAEDSLIVEVVGDPGKMVAIVQVLQRFGIREISRTGKVALTRESGVNTEFLKALEARV

SEQ ID NO: 185 - protein, 612 aa, Synechococcus elongatus PCC7942
MQLQTVTIQQRATGAYALIDSLCQHGVKHIFGYPGGAILPIYDELHRAEAAGRVQHILVRHEQGAVHAADAYSRATGEVGVCFATSGPGATNLVTGIATAQMDSIPMVVVTGQVPRTAIGTDAFQETDIYGITLPIVKHSYVVRDPRDMARIVAEAFHIAQSGRPGPVLIDVPKDVGTEEFDYVPVAPGDIRLPGYRPTTRGNPRQIAQAIALVKVARRPLLYVGGGAITAGAHAELRAFAERFQLPVTTTLMGKGAFDERHPLALGMLGMHGTAYANFAVSECDLLIAVGARFDDRVTGKLDEFASKAQVIHVDIDPAEVGKNRVPEVPIVGDVRQVLNELLARAEEQISADDATRTQPWLDRIAYWKREYPLQIPYYADVLSPQQVIHSLGEAAPDAYFTTDVGQHQMWAAQFIKNGPRRWISSAGLGTMGFGMPAAMGAQMALPDDTVICVAGDASILMNIQELGTLAQYNIPIKVVVVNNGWQGMVRQWQEAFYDERYSNSNMERGMPDFVKLAEAFGIKGMRVSHPDELQAAIAEMLAFDGPVFLDAIVKRDENCYPMVPSGHSNAQMLGLPKDPTLDLDLAIATCSSCGAKTLPSHKFCPDCGAKL

SEQ ID NO: 186 - protein, 327 aa, Synechococcus elongatus PCC7942
MYYDADANLDLLNGKTVAIIGYGSQGHAHALNLRDSGVNVVVGLYPGSKSAAKAEAEGLKVLPVAEAAQAADWIMILLPDEFQKSVFENEIRPALSAGKVLAFAHGFNIHFAQIVPPADVDVVMIAPKSPGHLVRRTYEQGQGVPCLFAIYQDASGQARDRAMAYAKGIGGTRAGILETSFREETETDLFGEQAVLCGGLSALIKAGFETLVEAGYQPELAYFECLHEVKLIVDLIVEGGLAAMRDSISNTAEYGDYVTGPRLITEETKAEMKRVLADIQQGRFALDFVQECGAGKPVMTATRRLEAEHPIESVGKDLRAMFSWLKK

SEQ ID NO: 187 - protein, 619 aa, Synechococcus elongatus PCC7942
MPQYRSRTTTYGRNMAGARALWRATGMKDEDFEKPIIAVANSFTQFVPGHVHLKDLGQLVAREIERAGGVAKEFNTIAVDDGIAMGHGGMLYSLPSRDLIADSVEYMVNAHCADALVCISNCDKITPGMLMAALRLNIPAVFVSGGPMEAGKVILNGEERHLDLVDAMVVAADDRESDEDVATIERSACPTCGSCSGMFTANSMNCLTEALGLSLPGNGSLLATHGDRKELFLEAGRLAVKLAKQYYEQDDESVLPRSIASFKAFENAICLDIAMGGSTNTVLHLLAAAHEAGVDFTMKDIDRLSRKIPNLCKVAPSTQKYHMEDVHRAGGVIAILGELDRAGLLHREVPTVHSPSLGAALDQWDINRETATEEAKSRYLAAPGGVPTQEAFSQSKRWTALDLDRENGCIRDIEHAYSQDGGLAVLYGNLAEQGCIVKTAGVDENILVFSGPAVVCESQDEAVNWILNGRVKEGDVVLIRYEGPRGGPGMQEMLYPTSYLKSKGLGKACALITDGRFSGGTSGLSIGHVSPEAAEGGLIALVEQGDRIEIDIPNRRIHLAVSEEELAHRRAAMEARGDQAWTPKDRDRPISQALQAYAAMTTSAARGGVRDLSQILGSR

SEQ ID NO: 188 - protein, 542 aa, Synechococcus elongatus PCC7942
MTRPASAAIAVYDTTLRDGAQREGLSLSLEDKLRIAHCLDRLGVKFIEGGWPGANPKDVQFFWELQQRPLQQAEVVAFCSTRRPGQIAGEDELLKALLAAGTTWVTIFGKSWDLHVVEGLKTSLDENLVMISDSIAYLRTCDRRVIYDAEHWFDGYLANPDYALQTLAAAIEAGAEWIVLCDTNGGCLPHQISEIVAAVLDRFPSLAPDQTGPQLGIHTHNDSETAVANAIAAVQAGARMVHGTINGYGERCGNANLCSVIPNLQLKLGYDCVETEQLMQLTATSRLVSEIVNLAPDDHAAYVGQSAFAHKGGIHVSAVERNPLTYEHIRPEQVGNLRRIVISEQSGLSNVLAKARSFGLDLQRNDPACRDLLARLKELESQGYQFEAAEASFDLLMREATGDRPHFFDLKDFHVHCSKQRQELNALATVKVAVTGRDILESAEGNGPVSALDAALRKAIGSFYPAVMQFHLSDYKVRILDGAAGTSAKTRVLVESSNGSQRWSTVGVSGNIIEASYQAVVEGIEYGLLLQQQAPLQAAEKP

SEQ ID NO: 189 - protein, 540 aa, Synechococcus elongatus PCC7942
MASASSNDRILIFDTTLRDGEQSPGASLNLEEKLAIARQLARLNVDIIEAGFAFASPGDFEAVQRIAAEVGTPDGPTICSLARATRQDIKAAAEALAPAAKGRIHTFIATSDIHLEYKLKKTRAEVLAVIPEMVGYAASLVDDVEFSPEDAGRSDPEFLYECLEAAIAAGAKTINIPDTVGYTTPSEFGALIGGIKQNVCNIDQAIISVHGHNDLGLAVANFLEAVKNGARQLECTINGIGERAGNAALEELVMALHVRRQYFNPFLGRAADSEAPLTQVNTREIYKTSRLVSNLTGMLVQPNKAIVGANAFAHESGIHQDGVLKNKLTYEIVDAETIGLSTNRITLGKLSGRNAFRTRLQELGYDLGEDDLNRAFLRFKELADKKREVTDRDLEAIVNDETQQAPELFKLELVQVSAGDHARPTATVTLRTPEGEELTDAAIGTGPVDAIYRAINRVVNIPNELIEFSVKSVTAGIDAIGEVTIRLRHEDRIFSGHSANTDILVASAQAYIHALNRLAEALQKDKPLHPQEPIVAGMGR

SEQ ID NO: 190 - protein, 202 aa, Synechococcus elongatus PCC7942
MGSEILEVTGRAVPLVGNDIDTDRIIPARFLRSVTFDGLGANVFIDDRQQLQGQHPFDQAQYQGATVLVVNRNFGCGSSREHAPQAIAKWGIQAIVGESFAEIFFGNCLSLGIPCVTAGAAAVAELQAAIASDPSQPVTVDLEELQVRRGAWSAELTLAPGPLQMLRSGQWDATGQLVANAEAIAQTAANLPYVGWQAIAAS

SEQ ID NO: 191 - protein, 468 aa, Synechococcus elongatus PCC7942
MSRGTLFDKVWDLHTVATLPSGQTQLFIGLHLIHEVTSPQAFSMLRDRGLTVKFPGRTVATVDHIVPTENQARPFADSLAEEMIVTLERNCRENGIRFYNIGSGSQGIVHVIAPEQGLTQPGMTIACGDSHTSTHGAFGAIAFGIGTSQVRDVLASQTLALSKLKVRKIEVNGELQPGVYAKDVILHIIRKLGVKGGVGYAYEFAGSTFAAMSMEERMTVCNMAIEGGARCGYVNPDQITYDYLQGREFAPQGEAWDRAIAWWESLRSEADAEYDDVVVFDAAEIAPTVTWGITPGQGIGITETIPTPDSLLDEDRAVAAEAYSYMDLEPGAPLQGTKVDVCFIGSCTNGRLSDLREAAKVAQGRKVAAGIKAFVVPGSERVKQQAEAEGLDQIFTAAGFEWRQAGCSMCLAMNPDKLEGRQISASSSNRNFKGRQGSASGRTLLMSPAMVAAAAIAGEVTDVRNWLN

SEQ ID NO: 192 - protein, 365 aa, Synechococcus elongatus PCC7942
MTRSYRITLLPGDGIGPEIMAVTVDILRAIGRQFDLNFEFEEALIGGSAIDATGEPLPEATLATCRNSDAVLLAAIGGYKWDSLPRSQRPETGLLGLRAGLGLFANLRPAAILPQLVDASSLKREVIEGVDLMVVRELTGGIYFGEPKGCFADEQGRQRAFNTMVYREDEIDRIGRVAFDIARKRGKRLCSVDKANVLEVSQLWRDRMTLLGSDYADVELSHLYVDNAAMQLVRWPKQFDTIVTGNLFGDILSDIAAMLTGSIGMLPSASLGAEGPGVFEPVHGSAPDIAGQDKANPLAQVLSAAMMLRYGLDEPEAAARIEAAVNQVLDQGYRTGDLYSEGMTLVGCKGMGDALLAALESPVSA

SEQ ID NO: 193 - protein, 570 aa, Bacillus subtilis subtilis 168
MTKATKEQKSLVKNRGAELVVDCLVEQGVTHVFGIPGAKIDAVFDALQDKGPEIIVARHEQNAAFMAQAVGRLTGKPGVVLVTSGPGASNLATGLLTANTEGDPVVALAGNVIRADRLKRTHQSLDNAALFQPITKYSVEVQDVKNIPEAVTNAFRIASAGQAGAAFVSFPQDVVNEVTNTKNVRAVAAPKLGPAADDAISAAIAKIQTAKLPVVLVGMKGGRPEAIKAVRKLLKKVQLPFVETYQAAGTLSRDLEDQYFGRIGLFRNQPGDLLLEQADVVLTIGYDPIEYDPKFWNINGDRTIIHLDEIIADIDHAYQPDLELIGDIPSTINHIEHDAVKVEFAEREQKILSDLKQYMHEGEQVPADWKSDRAHPLEIVKELRNAVDDHVTVTCDIGSHAIWMSRYFRSYEPLTLMISNGMQTLGVALPWAIGASLVKPGEKVVSVSGDGGFLFSAMELETAVRLKAPIVHIVWNDSTYDMVAFQQLKKYNRTSAVDFGNIDIVKYAESFGATGLRVESPDQLADVLRQGMNAEGPVIIDVPVDYSDNINLASDKLPKEFGELMKTKAL

SEQ ID NO: 194 - protein, 491 aa, Escherichia coli K-12, MG1655
MANYFNTLNLRQQLAQLGKCRFMGRDEFADGASYLQGKKVVIVGCGAQGLNQGLNMRDSGLDISYALRKEAIAEKRASWRKATENGFKVGTYEELIPQADLVINLTPDKQHSDVVRTVQPLMKDGAALGYSHGFNIVEVGEQIRKDITVVMVAPKCPGTEVREEYKRGFGVPTLIAVHPENDPKGEGMAIAKAWAAATGGHRAGVLESSFVAEVKSDLMGEQTILCGMLQAGSLLCFDKLVEEGTDPAYAEKLIQFGWETITEALKQGGITLMMDRLSNPAKLRAYALSEQLKEIMAPLFQKHMDDIISGEFSSGMMADWANDDKKLLTWREETGKTAFETAPQYEGKIGEQEYFDKGVLMIAMVKAGVELAFETMVDSGIIEESAYYESLHELPLIANTIARKRLYEMNVVISDTAEYGNYLFSYACVPLLKPFMAELQPGDLGKAIPEGAVDNGQLRDVNEAIRSHAIEQVGKKLRGYMTDMKRIAVAG

SEQ ID NO: 195 - protein, 616 aa, Escherichia coli K-12, MG1655
MPKYRSATTTHGRNMAGARALWRATGMTDADFGKPIIAVVNSFTQFVPGHVHLRDLGKLVAEQIEAAGGVAKEFNTIAVDDGIAMGHGGMLYSLPSRELIADSVEYMVNAHCADAMVCISNCDKITPGMLMASLRLNIPVIFVSGGPMEAGKTKLSDQIIKLDLVDAMIQGADPKVSDSQSDQVERSACPTCGSCSGMFTANSMNCLTEALGLSQPGNGSLLATHADRKQLFLNAGKRIVELTKRYYEQNDESALPRNIASKAAFENAMTLDIAMGGSTNTVLHLLAAAQEAEIDFTMSDIDKLSRKVPQLCKVAPSTQKYHMEDVHRAGGVIGILGELDRAGLLNRDVKNVLGLTLPQTLEQYDVMLTQDDAVKNMFRAGPAGIRTTQAFSQDCRWDTLDDDRANGCIRSLEHAYSKDGGLAVLYGNFAENGCIVKTAGVDDSILKFTGPAKVYESQDDAVEAILGGKVVAGDVVVIRYEGPKGGPGMQEMLYPTSFLKSMGLGKACALITDGRFSGGTSGLSIGHVSPEAASGGSIGLIEDGDLIAIDIPNRGIQLQVSDAELAARREAQDARGDKAWTPKNRERQVSFALRAYASLATSADKGAVRDKSKLGG

SEQ ID NO: 196 - DNA, 627 bp, Escherichia coli
atgatgaacttcaacaatgttttccgctggcatttgcccttcctgttcctggtcctgttaaccttccgtgccgccgcagcggacacgttattgattctgggtgatagcctgagcgccgggtatcgaatgtctgccagcgcggcctggcctgccttgttgaatgataagtggcagagtaaaacgtcggtagttaatgccagcatcagcggcgacacctcgcaacaaggactggcgcgccttccggctctgctgaaacagcatcagccgcgttgggtgctggttgaactgggcggcaatgacggtttgcgtggttttcagccacagcaaaccgagcaaacgctgcgccagattttgcaggatgtcaaagccgccaacgctgaaccattgttaatgcaaatacgtctgcctgcaaactatggtcgccgttataatgaagcctttagcgccatttaccccaaactcgccaaagagtttgatgttccgctgctgcccttttttatggaagaggtctacctcaagccacaatggatgcaggatgacggtattcatcccaaccgcgacgcccagccgtttattgccgactggatggcgaagcagttgcagcctttagtaaatcatgactcataa

SEQ ID NO: 197 - DNA, 1474 bp, Cuphea hookeriana
ctggataccattttccctgcgaaaaaacatggtggctgctgcagcaagttccgcattcttccctgttccagccccgggagcctcccctaaacccgggaagttcggaaattggccctcgagcttgagcccttccttcaagcccaagtcaatccccaatggcggatttcaggttaaggcaaatgacagcgcccatccaaaggctaacggttctgcagttagtctaaagtctggcagcctcaacactcaggaggacacttcgtcgtcccctcctcctcggactttccttcaccagttgcctgattggagtaggcttctgactgcaatcacgaccgtgttcgtgaaatctaagaggcctgacatgcatgatcggaaatccaagaggcctgacatgctggtggactcgtttgggttggagagtactgttcaggatgggctcgtgttccgacagagtttttcgattaggtcttatgaaataggcactgatcgaacggcctctatagagacacttatgaaccacttgcaggaaacatctctcaatcattgtaagagtaccggtattctccttgacggcttcggtcgtactcttgagatgtgtaaaagggacctcatttgggtggtaataaaaatgcagatcaaggtgaatcgctatccagcttggggcgatactgtcgagatcaatacccggttctcccggttggggaaaatcggtatgggtcgcgattggctaataagtgattgcaacacaggagaaattcttgtaagagctacgagcgcgtatgccatgatgaatcaaaagacgagaagactctcaaaacttccatacgaggttcaccaggagatagtgcctctttttgtcgactctcctgtcattgaagacagtgatctgaaagtgcataagtttaaagtgaagactggtgattccattcaaaagggtctaactccggggtggaatgacttggatgtcaatcagcacgtaagcaacgtgaagtacattgggtggattctcgagagtatgccaacagaagttttggagacccaggagctatgctctctcgcccttgaatataggcgggaatgcggaagggacagtgtgctggagtccgtgaccgctatggatccctcaaaagttggagtccgttctcagtaccagcaccttctgcggcttgaggatgggactgctatcgtgaacggtgcaactgagtggcggccgaagaatgcaggagctaacggggcgatatcaacgggaaagacttcaaatggaaactcggtctcttagaagtgtctcggaacccttccgagatgtgcatttcttttctccttttcattttgtggtgagctgaaagaagagcatgtcgttgcaatcagtaaattgtgtagttcgtttttcgctttgcttcgctcctttgtataataatatggtcagtcgtctttgtatcatttcatgttttcagtttatttacgccatataattttt

SEQ ID NO: 198 - protein, 5 aa, Artificial Sequence
  Pah1-encoded PAP1 enzyme catalytic motif
  VARIANT (2)..(2): Xaa = Any Amino Acid
  VARIANT (4)..(4): Xaa = Any Amino Acid
DXDXT

SEQ ID NO: 199 - protein, 1406 aa, Synechococcus elongatus PCC7942-0858
MSTTQRPESTPASINNQTTEALTPKLNGADQVTSFTSVETSSLSGPANKPARTGLKLKLTLLAIAMGVLPVLGVGVTVHNLVNRSITEMTETSSSPTAQVEADQLKRSLFLTLLWGTGLSAVAVGIIAAALANRSSRRLQAAIAALEKLSQGDVNVAVAEDGDDEIAVLGQEINHAASQIQTALATAEVSREQQRSETVRVNQLVREITLRLISQANVTDVLNVAVQEARAAIGCDRVVVYKFDETWAGTIIAESVDPGWPQALQVTIDDPCFRKDWVAAYAAGRVQVTADIYDANLTECHIKQLEPIAVRANLVTPIIVERRLIGLFIAHQCSGPYQWKQLEVDLMTQLATQVGLAMTRALFLEQQVIEAERAKLVRTITTELVAQADVEGVLRTAVQETRRALEADRVIVYEFDEKWSGKIIAESGDPNWPSGLNVVIDDPCFRRDWVEAYAAGRVQATADIYNAGLTECHIQQLEPLAVKANLVAPIVVEKKLIALFIAHQCSGPRDWQQSEIDLFAQIATQVGLAMTRARFLEQQIAEANRAKLVRSITSELVAQADVKSVLRTAVQETRRAIKADRVVVYEFDENWSGKIVAESSDSNWPAALNVVIDDPCFRRDWVEAYAAGRVQATADIYNAGLTECHIQQLEPLAVKANLVAPIVVEKKLIALFIAHQCSGPRNWQQSEIDLFSQLATQVGLATTRARFLEQQVSEVNRAKLVRDITSQLVSPTNVASVLQLAVHATRRALDTDRVVVYEFDSTWAGTVTAESVNPSWPSALNVTIDDPCFRRDWVDAYAAGRIQATPDIYNAGLTECHLKQLEPLAVKANLVAPIVVEKKLIALFVAHQCSGPRNWQRSEIDLFSQLATQLGLAITRARFLEQQVTEAKRAEQIREITSRLVAQANPEDVLQTAVKETRRALATDRVVVYAFDETWSGTVIAESVEYGWPSALSITIDDPCFRRDWVDAYAAGRIQATPDIYNAGFTECHLKQLEPLAVKANLVAPIVVEKKLIALFVAHQCSGARDWQQSEIDLFSQLATQIGLALARADFLQQAETARDRAEQLAQEQQQRTEAIQAELIQLLSDVEDASRGDLTVRADISAGEISTVADIFNSLIESLRAVVVQVKASTQKVNTSLDSDANSMQRLAADSQSQAEKIKKTLNAVAEMSKSILDVSNTANQAAEVARKSSQTAISSGQTMDETVRSILHLRETVAETAKKVKRLGESSQQISKVISLINQIALQTNLLAINASIEAARAGEEGRGFAVVAEEVGQLATRSANATKEIEQIVETIQQETNEVVTAMETGTSQVVEGTQLVEATKKSLEEIVQVSQQIDQLVQAISQATVSQSQTSNVVTNLMEEMAGFSEEISDTSRHISASLQATVAVAQKLKSSVDTFRVGAEE

SEQ ID NO: 200 - DNA, 4221 bp, Synechococcus elongatus PCC7942-0858
atgtccaccacccaacgccctgaaagcacccccgcttccatcaacaatcaaacgactgaagcgctgaccccaaaactaaacggtgctgatcaggtgacgtcattcacttcggttgaaacgagttctctctctggcccagctaacaaaccagcgcgcacgggactcaagctcaagttgaccctgctagcgattgctatgggtgtcctgcctgtcctaggggtaggagtcaccgttcataacctcgtcaaccggtcaattaccgagatgaccgaaacaagcagcagtccaacagcgcaggtggaagccgaccagctcaaacgcagtcttttcctgactctgctctggggtaccggcttatcagccgtggcggtcggcataattgcagctgctttggccaaccgcagtagccgacgcttgcaagctgcgatcgcagctcttgaaaagctcagtcaaggggatgtgaatgttgccgttgccgaggatggtgacgatgagattgccgttttagggcaagaaattaaccacgctgccagtcaaattcaaacagccttagcaactgcagaggtcagtcgggagcaacaacgctcagaaacagttcgggtcaatcagctggtccgtgaaattacgctgcggctgatttctcaagccaatgtgactgacgttctgaatgtcgcagtccaagaggctcgcgctgcgatcggatgtgatcgcgtggttgtctacaagtttgatgagacttgggctggaacgatcatcgctgagtcggttgatccaggatggccccaagctctgcaggtaaccattgatgatccttgtttccgcaaagattgggtagcggcctacgcagcgggtcgggttcaggtcacagctgatatttatgatgcgaatttaactgaatgccatatcaagcaactggagccgattgcagttcgtgccaacctagttaccccgatcattgttgagagacgactgattggtctattcattgctcaccaatgctctgggccgtaccagtggaagcagttagaagttgatctcatgactcagcttgccacacaagttggcttagctatgacgcgcgcgctgttcctagagcagcaggtgattgaagcagaacgcgctaagcttgtgcgaaccatcaccacagagctggtggctcaggctgatgttgagggggtgctgagaacagctgtccaagaaactcggagggctctcgaagccgaccgcgtcatcgtttatgaattcgatgagaagtggagcggcaaaattattgcggagtctggcgaccccaattggccatcaggactcaatgttgtcattgacgacccctgttttcgtcgggactgggttgaagcctatgcggctggacgcgttcaggcgacagcagatatttataatgcaggcctaaccgaatgtcatattcagcaactggagcccttggcggtcaaagccaatctggttgcgcccattgtggtcgagaaaaaactaatcgctctgtttattgcccaccaatgctcaggcccaagagactggcagcaatctgaaattgatctgttcgcccaaatagccacacaggtcggtttggcaatgacccgcgcgcgcttcttagaacagcaaattgctgaagccaatcgggccaaacttgtgcggtcaattacatcagagttagttgctcaagctgatgttaagagcgtgctcagaacagctgttcaagagactcgccgtgcaatcaaggccgatcgcgttgtggtctatgaatttgatgagaattggagtggcaagatcgttgctgagtcgagcgactctaattggccagcggccctcaacgttgtcattgatgacccctgcttccgtagagattgggttgaagcctacgcggctggacgcgttcaggcgacagcagatatttataatgcaggcctaaccgaatgtcatattcagcaactggagcccttggcggtcaaagccaatctggttgcgcccattgtggttgagaaaaaactgattgccttattcatcgcgcatcaatgttccggcccacgcaattggcaacagtctgaaattgatctctttagtcagctcgcgacacaagttggtttggcaacgactcgggctcgtttccttgagcaacaagtgtcagaggtcaaccgtgccaaactagttcgagacatcacctcacagctcgtttctcctacaaacgttgcaagtgtcttgcaactagcggtacacgcgactcgtcgtgcactcgatactgatcgcgttgttgtctacgaatttgacagtacttgggctggtacagtaaccgctgagtcggttaacccttcttggccttctgccctcaatgtcacgattgatgacccttgcttccgacgcgattgggtggatgcctatgctgcaggtcgaattcaagcgactccagacatctacaatgcaggcctcacagaatgccatctcaaacaactggagcccttggcagtcaaagccaatctggttgccccaattgtggttgagaaaaaactaattgctttgtttgttgctcatcaatgttcagggccacgtaactggcagcgatctgagattgatctgtttagtcagctagcaacgcaactagggttggcaattacccgcgcccgtttccttgagcaacaggttacagaggcaaaacgggcagagcaaatccgcgaaattacctccagattagttgcgcaagctaatcctgaagatgtgcttcaaactgcagtgaaagagactcgccgtgcgctcgctaccgatcgcgttgtggtctatgccttcgatgaaacttggtcaggtactgtgattgcagagtcagttgaatatggctggccctcagcactgagtatcacgatcgatgacccctgcttcagacgggattgggtagatgcctatgctgcaggccgcattcaggcgactcctgatatttacaatgctggatttacggaatgccatctcaagcaattggagcctttggcagtcaaggccaatctggtggccccgattgtggttgagaaaaaactgattgccctgtttgttgctcaccaatgttcaggagcacgagattggcagcaatctgaaattgatttgtttagccaactcgccacgcaaattggcttagccttagcgcgtgcagattttctacagcaagctgaaacagcacgcgatcgcgctgagcaactggcacaagagcaacagcaacggaccgaagcgattcaagccgaactgattcaacttctcagtgatgtcgaagatgcatcacgaggtgatctcactgttcgtgctgacatctcagccggtgaaattagtacagttgctgatattttcaactctctgattgaaagtttgcgagccgtcgtagtccaagtaaaagcctccactcagaaggtgaatacttctctggatagcgatgctaactcgatgcaacgactagcagcagactcccaaagtcaggcagaaaagattaaaaagaccctaaatgctgttgctgagatgtcgaaatcaattcttgatgtctcgaacacagcaaaccaagctgctgaagttgcacgcaaatcatcgcaaacagctatcagtagtggtcaaacaatggatgagactgttcgcagtattcttcatctacgcgaaactgttgctgaaactgctaagaaggtgaagcggctcggtgaatcttctcaacagatctcaaaagtgatctcgttgattaaccaaattgctctgcaaacaaatctacttgcaattaatgccagtattgaggcggcacgagctggtgaagaaggtcgtggctttgcagtcgttgcagaagaggttggccagttagcaacacggtccgctaacgctaccaaggaaattgagcagattgttgaaacgattcagcaagaaacgaatgaggtggttacggctatggaaacaggtaccagccaagtagtcgagggaacacagctggtcgaggcgactaagaaaagccttgaagaaatcgtgcaggtttcccaacagattgaccaacttgtacaggcaatctcgcaagcaaccgtcagccagtctcagacctctaatgttgtgactaacctcatggaggagatggccggtttctcagaggaaatttcagacacctcccgtcacatttccgcttcactacaggctactgtggctgtcgctcagaaacttaaatcctccgttgacacctttagagtcggagctgaggaatag

SEQ ID NO: 201 - protein, 839 aa, Synechococcus elongatus PCC7942-1015
MTSMASEDRSLSYEQVEQEYLSGHYSEAAELAEALVQTEPQNPRLRLLRGHIFYSLGRNDQARVEYELIRGITPDPDILEQALLGMDRCDSRPHEDVSSDMEGTVIVPIGAALPVIEQVDPSALALDLPPLSGTDTIAEEPSSDRDDGDNPFATDPASPAASETEAEAPAWLADIEESAFSSTDESSPEPWAEAAEAEETAVAEPAVEEAIAPAAETLIASEPEAIPEPLSPEVDLAESQPPITADETVVEVDLAAEFAALAEPEEVASEPAASTAGLEEPGPVSFDAIADEVAKEVLGAAETAVAPQPELKASPAPVLENLPTPPNLAEAAAIARQPVTSPLRPQETKANRAAVAATPASNAPKALPTPPKQTAETRVGLIALVSALAAAAVGVVGWQASTPEARNRVVLASMASMAVAGAASAGIALQLQNRTGKRYRDLLERLNEQCQQMSNGDFETPLQVGGNDDVGMLALRFDRMRSVLGDRINRQEKRLTTLEQQREGLQNQVIRLLDDVEGVAHGDLTVQAEVTADVLGAVADSFNLTIQNLREIVAQVRDAALQVNAAATDNEQSAKNLSAEALHQAEELAAALNSVQVMTESIQRVAISASEAESVARAASQTALKGGEAVDKTLSGILRIRETVAETTRKVKKLAESSQEISKIVALISQVASRTNLLALNASIEAARAGQAGRGFAIVADEVRQLADRAAKSSKEIEQIVLKIQSETGLVMTAMEEGTQQVIQGTRLAEQARGALDEIIQVSTKIDDLVQSITADTVQQTAMSRSMAEVMQSVETTAQNTSQEAQQVAASLQGLVNIAGTLRESVDRFRLQASAAKEN

SEQ ID NO: 202 - DNA, 2520 bp, Synechococcus elongatus PCC7942-1015
atgacttcgatggcatctgaagaccgcagcctctcctacgagcaagttgaacaggagtacctcagtggccactacagtgaagcagctgagctagctgaggcactggttcagactgagccgcagaatcctcgcctgcgcttgctgcgcggtcatatcttctacagcttggggcgcaatgaccaagcacgggtcgagtacgagctgatccggggaatcacgcccgatcccgacattctcgagcaggctctgctgggaatggaccgttgtgatagccgcccccacgaggacgttagttcggatatggaaggcacggtgattgtgccgattggggcagctttgccggtgatcgaacaagtggatccgtcggccctagcactcgatttgcccccgctgagtggtacggatacgatcgcagaggaacctagctccgatcgcgatgatggcgacaatccttttgccaccgatccggctagccctgccgcctctgagaccgaggctgaggcaccagcctggttagcggacatagaagaatcagcattttcgtccacggatgaatcgagtcccgaaccttgggcagaggctgcggaagctgaagagacagcggtagcggagccagcagtagaggaagcgatcgccccagcggcagaaacgctgatcgccagtgagcctgaggcgattccagagccgctgtcgccagaagtcgatcttgctgaatcgcagccgccgatcacagcggacgagactgtcgtagaagttgatctggccgcagagttcgccgccttggctgagccagaagaggttgccagtgagccagccgcttctactgctgggctggaggaaccggggccggtcagttttgacgcgatcgctgatgaagtggccaaagaggtgctcggtgcagcagaaactgccgttgcgcctcagcccgagctgaaagccagtcctgcccccgttctcgagaacctacccacgccgcccaacctcgctgaagctgccgcgatcgctcggcaaccagtgacgtccccgctgcgcccccaagagaccaaagccaatcgggcagctgttgcggccactcctgccagcaatgcacccaaagccttaccaaccccgcccaagcaaacagcagaaacccgtgttggcttaatcgccctggtctcagccctagctgctgctgccgtaggggtggttggctggcaagcttcaacacccgaagcccgcaaccgcgttgtgctcgccagcatggccagcatggctgtggctggggctgcctctgctggtattgctctgcagctgcagaaccggacgggcaagcgctaccgcgatctgctggagcgacttaatgaacagtgccagcagatgagtaatggcgactttgaaacgcctctccaagtcggtggcaacgatgatgtcgggatgttggccctgcgcttcgatcgtatgcgcagtgtcttgggcgatcgcatcaaccgccaagagaagcgcctgaccaccctagagcagcaacgggaaggcctccaaaaccaggtgattcgtctgctggacgacgtagagggggtagcccacggtgacttgaccgttcaggctgaggtgacggccgacgttctcggggccgtggcggactcgttcaacctgacgattcagaacctacgcgagatcgtggcccaggtgcgcgatgcagcactgcaggtcaacgcagccgcaaccgacaacgaacagtccgcgaaaaacctgtcagcggaagcgctccaccaagccgaggaactcgccgctgccctcaactcagtccaggtgatgacggagtcgattcaacgggttgccatcagtgccagcgaagcggagtcggtcgcccgcgctgcttcgcaaacagctctcaagggcggtgaggcggttgacaagaccctctcagggattttgcggattcgcgaaacggtggccgaaacaacccgcaaggtgaagaagctggccgagtcttcccaagaaatttccaagatcgtggcgctgatctcgcaggtcgcttcacgaaccaacctgttggcactcaacgccagcattgaggcagctcgggccggtcaagccggacgagggtttgcgatcgttgcggatgaggttcgccagctggccgatcgcgccgcgaagtcctcgaaggagattgagcagatcgtgctcaagattcagagtgagacaggtttggtaatgactgccatggaggagggtacccagcaggtgattcaagggacgcgactggcagaacaggcccgtggtgctcttgatgaaatcattcaggtttcgaccaaaattgacgaccttgtccaatcgattacggccgacactgtgcaacagaccgccatgtctcgcagcatggccgaggtgatgcagtcggtggagaccaccgctcaaaacacctctcaagaggcgcagcaagtggctgcttccctgcagggcttggtaaatattgcagggacgttgcgagagtctgtggaccgcttccgcctacaagcatcggctgctaaggagaactga

SEQ ID NO: 203 - protein, 4 aa, Artificial Sequence
  Gly / Ser containing linker
GSGS

SEQ ID NO: 204 - protein, 4 aa, Artificial Sequence
  Gly / Ser containing linker
GGSG

SEQ ID NO: 205 - protein, 4 aa, Artificial Sequence
  Gly / Ser containing linker
GGGS

SEQ ID NO: 206 - protein, 5 aa, Artificial Sequence
  Gly / Ser containing linker
GGGGS

SEQ ID NO: 207 - protein, 4 aa, Artificial Sequence
  Gly / Asn containing linker
GNGN

SEQ ID NO: 208 - protein, 4 aa, Artificial Sequence
  Gly / Asn containing linker
GGNG

SEQ ID NO: 209 - protein, 4 aa, Artificial Sequence
  Gly / Asn containing linker
GGGN

SEQ ID NO: 210 - protein, 5 aa, Artificial Sequence
  Gly / Asn containing linker
GGGGN

SEQ ID NO: 211 - protein, 136 aa, Synechococcus elongatus
MSTTQRPESTPASINNQTTEALTPKLNGADQVTSFTSVETSSLSGPANKPARTGLKLKLTLLAIAMGVLPVLGVGVTVHNLVNRSITEMTETSSSPTAQVEADQLKRSLFLTLLWGTGLSAVAVGIIAAALANRSS

SEQ ID NO: 212 - protein, 84 aa, Synechococcus elongatus
MTLLAIAMGVLPVLGVGVTVHNLVNRSITEMTETSSSPTAQVEADQLKRSLFLTLLWGTGLSAVAVGIIAAALANRSSRRLQAA

SEQ ID NO: 213 - protein, 43 aa, Synechococcus elongatus
MSTTQRPESTPASINNQTTEALTPKLNGADQVTSFTSVETSSL

SEQ ID NO: 214 - protein, 48 aa, Synechococcus elongatus
MSTTQRPESTPASINNQTTEALTPKLNGADQVTSFTSVETSSLSGPAN

SEQ ID NO: 215 - protein, 53 aa, Synechococcus elongatus
MSTTQRPESTPASINNQTTEALTPKLNGADQVTSFTSVETSSLSGPANKPART

1-45. (canceled)

46. A diacylglycerol acyltransferase (DGAT) fusion polypeptide, comprising a DGAT polypeptide fused to a heterologous intracellular localization domain.

47. The DGAT fusion polypeptide of claim 46, where the intracellular localization domain is fused to the N-terminus of the DGAT polypeptide.

48. The DGAT fusion polypeptide of claim 46, where the intracellular localization domain is fused to an internal region of the DGAT polypeptide.

49. The DGAT fusion polypeptide of claim 46, where the intracellular localization domain is a thylakoid, vesicle, lipid body, glycogen granule, polyhydroxybutyrate (PHB) body, carboxysome, and/or cyanophycin granule-targeting domain.

50. The DGAT fusion polypeptide of claim 46, where the intracellular localization domain is a bacterial membrane-targeting domain or a bacterial plasma membrane (PM)-targeting domain.

51. The DGAT fusion polypeptide of claim 46, where the DGAT polypeptide is an Acinetobacter DGAT, a Streptomyces DGAT, or an Alcanivorax DGAT.

52. The DGAT fusion polypeptide of claim 46, comprising a peptide linker that separates the DGAT polypeptide and the intracellular localization domain.

53. An isolated polynucleotide that encodes the DGAT fusion polypeptide of claim 46.

54. A vector, comprising the isolated polynucleotide of claim 53, where the polynucleotide is operably linked to one or more regulatory elements.

55. A modified photosynthetic microorganism, comprising one or more introduced polynucleotides encoding a DGAT fusion polypeptide of claim 46.

56. The modified photosynthetic microorganism of claim 55, which produces triacylglycerols (TAGs), wax esters (WEs), free fatty acids (FFAs), or any combination thereof.

57. The modified photosynthetic microorganism of claim 55, further comprising one or more overexpressed acyl carrier proteins (ACP), acyl-ACP synthetases (Aas), or both.

58. The modified photosynthetic microorganism of claim 55, further comprising one or more overexpressed acyl-acyl carrier protein (acyl-ACP) reductases and one or more overexpressed alcohol dehydrogenases, where the modified photosynthetic microorganism selectively produces wax esters, free fatty acids, or both, relative to triacylglycerols.

59. The modified photosynthetic microorganism of claim 55, further comprising reduced expression and/or activity of one or more genes encoding an endogenous aldehyde dehydrogenase, an endogenous aldehyde decarbonylase, or both.

60. The modified photosynthetic microorganism of claim 55, where the introduced polynucleotide encoding the DGAT fusion polypeptide is operably linked to an inducible promoter.

61. The modified photosynthetic microorganism of claim 55, where the photosynthetic microorganism is a Cyanobacterium.

62. A method for modifying a photosynthetic microorganism, comprising introducing into the photosynthetic microorganism an isolated polynucleotide that encodes a DGAT fusion polypeptide of claim 46.

63. A method for production of lipids, comprising culturing a modified photosynthetic microorganism of claim 55.

64. The method of claim 63, where said culturing comprises inducing expression of the DGAT fusion polypeptide.

65. The method of claim 63, comprising production of triacylglycerols, wax esters, free fatty acids, or any combination thereof.
